(19) United States
(12) Patent Application Publication
(10) Pub. No.: US 2017/0073406 A1
(43) Pub. Date: Mar. 16, 2017

(54) COMPOSITIONS AND METHODS FOR GROWTH FACTOR MODULATION

(71) Applicant: SCHOLAR ROCK, INC., Cambridge, MA (US)

(72) Inventors: Thomas Schurpf, Cambridge, MA (US); Gregory P. Chang, Reading, MA (US); Nagesh K. Mahanthappa, Cambridge, MA (US)

(21) Appl. No.: 15/309,141

(22) PCT Filed: May 6, 2015
(86) PCT No.: PCT/US2015/029365

§ 371 Date: Nov. 4, 2016

Related U.S. Application Data
(60) Provisional application No. 61/989,200, filed on May 6, 2014.
(60) Provisional application No. 62/076,200, filed on Nov. 6, 2014.
(60) Provisional application No. 62/100,351, filed on Jan. 6, 2015.

(51) Int. Cl. C07K 16/22; A61K 38/18

(52) U.S. Cl. CPC C07K 16/22; A61K 38/1841; A61K 38/18; C07K 2317/92; C07K 2317/75

(57) ABSTRACT

Provided herein are proteins, antibodies, assays and methods useful for modulating growth factor levels and/or activities. In some embodiments, such growth factors are members of the TGF-β superfamily of proteins.

### CROSS REFERENCE TO RELATED APPLICATIONS

[0001] This application claims priority to U.S. Provisional Application No. 61/989,200 entitled Compositions and Methods for Growth Factor Modulation filed on May 6, 2014; U.S. Provisional Application No. 62/076,200 entitled Compositions and Methods for Growth Factor Modulation filed on Nov. 6, 2014; and U.S. Provisional Application No. 62/100,351 entitled Compositions and Methods for Growth Factor Modulation filed on Jan. 6, 2015, the contents of each of which are herein incorporated by reference in their entirety.

### SEQUENCE LISTING

[0002] The instant application contains a Sequence Listing which has been submitted electronically in ASCII format and is hereby incorporated by reference in its entirety. Said ASCII copy, created on May 6, 2015, is named 2035_1005PCT_SL.txt and is 979,968 bytes in size.

### FIELD OF THE INVENTION

[0003] Embodiments of the present invention may include recombinant proteins as well as antibodies directed to such proteins. In some embodiments, such proteins and antibodies may be related to the field of TGF-β family member biology.

### BACKGROUND OF THE INVENTION

[0004] Cell signaling molecules stimulate a variety of cellular activities. Such signaling is often tightly regulated, often through interactions with other biomolecules, the extracellular and/or cellular matrix or within a particular cell environment or niche. Such interactions may be direct or indirect.

[0005] Cell signaling cascades are involved in a number of diverse biological pathways including, but not limited to modulation of cell growth, modulation of tissue homeostasis, extracellular matrix (ECM) dynamics, modulation of cell migration, invasion and immune modulation/suppression. In some cases, proteins involved in cell signaling are synthesized and/or are sequestered in latent form, requiring stimulus of some kind to participate in signaling events. There remains a need in the art for agents, tools and methods for modulating cell signaling and/or cellular activities.

### SUMMARY OF THE INVENTION

[0006] In some embodiments, the present invention provides a method of increasing the level of free growth factor in a biological system comprising contacting said biological system with antibody MAB246 and/or MAB2463 and/or a fragment thereof. In some cases, the biological system is selected from the group consisting of an in vitro biological system and an in vivo biological system. In vivo biological systems may be selected from the group consisting of a niche, a tissue, a body fluid, an organ, an organ system and a subject. In some cases, growth factor levels being increased may be TGF-β family member growth factor levels. Such TGF-β family members may be selected from the group consisting of TGF-β1, TGF-β2 and TGF-β3.

[0007] In some embodiments, the present invention provides a method of increasing growth factor activity in a biological system, comprising contacting said biological system with antibody MAB246 and/or MAB2463 and/or a fragment thereof. Such growth factors may include TGF-β family member growth factors, including, but not limited to TGF-β1, TGF-β2 and TGF-β3. In some cases, biological systems comprise at least one integrin. Integrins may be selected from the group consisting of αVβ6 and αVβ8 integrins.

[0008] In some embodiments, the present invention provides one or more methods of enhancing integrin-dependent growth factor activity in a biological system. In some cases, such methods include the use of MAB246 and/or MAB2463.

[0009] In some embodiments, the present invention provides a method of dissociating one or more growth factors from one or more growth factor prodomain complexes (GPC) in a biological system comprising contacting said biological system with antibody MAB246 and/or MAB2463 and/or a fragment thereof.

[0010] In some embodiments, the present invention provides a method of treating a disease, disorder and/or condition, such as a TGF-β-related indication in a subject comprising administering antibody MAB246 and/or MAB2463 and/or a fragment thereof. Such methods include the treatment of tooth loss and/or degeneration. In some cases, the invention provides a method of increasing proliferation of one or more cells in a biological system comprising contacting said biological system with antibody MAB246 and/or MAB2463 and/or a fragment thereof. Such biological systems may, in some cases, be selected from the group consisting of a niche, a tissue, a body fluid, an organ, an organ system and a subject.

[0011] Also provided are compositions comprising antibody MAB246 and/or MAB2463 and at least one excipient. Such excipients may be pharmaceutically acceptable excipients. In some cases, compositions of the invention may be comprised in a kit, further comprising instructions for use.

[0012] In some aspects, the invention provides a method of modulating growth factor activity in a biological system comprising contacting said biological system with a targeting complex. Such methods may include reducing growth factor activity in one or more target site. In some cases, targeting complexes comprise a LAP complexed with a protein selected from the group consisting of LTBP1, LTBP1S, LTBP2, LTBP3 and LTBP4.

[0013] In some embodiments, the invention provides a method of treating a TGF-β-related indication comprising a fibrotic indication. Such methods may comprise the use of a targeting complex. Such fibrotic indications may be selected from the group consisting of lung fibrosis, kidney fibrosis, liver fibrosis, cardiovascular fibrosis, skin fibrosis, and bone marrow fibrosis.

### BRIEF DESCRIPTION OF THE FIGURES

[0014] The foregoing and other objects, features and advantages will be apparent from the following description of particular embodiments of the invention, as illustrated in the accompanying drawings. The drawings are not necessarily to scale, emphasis instead being placed upon illustrating the principles of various embodiments of the invention.

[0015] FIG. 1 is a diagram of the TGF-beta superfamily tree, where divergence is proportional to branch length.

[0016] FIG. 2 is a schematic of one embodiment of a linear representation of a translated growth factor monomer. In such embodiments, translated growth factors may comprise secretion signal peptides, prodomains and growth factor domains. In embodiments according to embodiment depicted here, translated growth factors may also comprise a cleavage site between prodomain and growth factor regions.

[0017] FIG. 3 is a schematic of one embodiment of a growth factor-prodomain complex (GPC) as well as an embodiment of a free growth factor dimer and a free latency associated peptide (LAP) dimer. The arrow indicates the ability of proteins according to this embodiment to alter between free and complexed forms.

[0018] FIG. 4 is a schematic of one embodiment of a free LAP dimer and a free growth factor dimer with labeled features and/or protein modules.

[0019] FIG. 5 is a schematic of an embodiment of a recombinant GPC.

[0020] FIG. 6 is a schematic of embodiments of mutant recombinant GPCs.

[0021] FIG. 7 depicts schematic representations of five recombinant proteins alone or in complex with LTBP or GARP.

[0022] FIG. 8 shows structure-based alignment between TGF-β family member proteins [adapted from Shi et al (Shi, M. et al., Latent TGF-β structure and activation. Nature. 2011 Jun. 15; 474(7351):343-9, the contents of which are herein incorporated by reference in their entirety)]. Cysteine residues required for interaction with LTBPs and/or GARPs are boxed. Residues mutated in Camurati-Engelmann syndrome are indicated with a star. Protease cleavage sites are indicated with an up arrow. Protein modules and secondary structural elements are indicated with solid bars. Residues underlined at the N-terminus of GDF-8 correspond to alternatively predicted signal peptide processing sites. “Chimeric module breakpoints” indicate regions where structural features are conserved and provide modules for chimeric protein construction (swapping of modules between family members) in all family members. N-terminal regions are shown in (A), internal regions are shown in (B) and C-terminal regions are shown in (C). FIG. 8 discloses SEQ ID NOS 1, 122, 123, 385, 2, 3, 4, 142, 5, 136, 130, 6, 14, 21, 23, 24, 27, 26, 28 and 10, respectively, in order of appearance.

[0023] FIG. 9 presents 3 tables showing the percent identity between amino acid sequences found in the TGF-β family. FIG. 9A demonstrates percent identity among pro-proteins (prodomain and growth factor). Percent identity among growth factor domains is presented in FIG. 9B while percent identity among prodomains is presented in FIG. 9C.

[0024] FIG. 10 presents an alignment conducted between GDF-8 (myostatin), GDF-11, Inhibin A and a GDF-8 dimer. Arrows indicate cleavage sites. Regions involved in internal interactions are boxed. Solid rectangles appear above residues predicted to be involved in steric clashes in chimeric constructs. Stars denote important break points in protein modules. FIG. 10 discloses SEQ ID NOS 5, 4, 6 and 386, respectively, in order of appearance.

[0025] FIG. 11 depicts the expression and purification of recombinant antigens and antigen complexes (Coomassie Blue stained SDS-PAGE).

[0026] FIG. 12 presents results from analyses of cell lines stably expressing TGF-β1 complexed with sGARP. 300.19 cells stably transfected with empty vector control (A), complexes of sGARP and proTGF-β1 (B) or complexes of sGARP and TGF-β1 LAP (C) were fluorescently labeled with antibodies directed to expressed proteins and examined for fluorescence intensity by flow cytometry. Luciferase assay data is presented in (D) showing TGF-β signaling activity resulting from co-culture of these cells with cells expressing αvβ₆ integrin.

[0027] FIG. 13 depicts recombinant histidine-tagged proGDF-8, separated by SDS-PAGE under reducing and non-reducing conditions, as visualized by Coomassie staining.

[0028] FIGS. 14A and 14B depict the results of electrophoresis of expressed and purified LTBP1S proteins (colloidal blue staining).

[0029] FIG. 15 presents results from a growth factor activity assay.

[0030] FIGS. 16A and 16B present results from antibody binding assays.

### DETAILED DESCRIPTION

[0031] Growth factors are cell signaling molecules that stimulate a variety of cellular activities. Due to their broad-reaching influence within biological systems, growth factor signaling is tightly regulated, often through interactions with other biomolecules, the extracellular and/or cellular matrix or within a particular cell environment or niche. These interactions may be direct or indirect.

[0032] Growth factors of the transforming growth factor beta (TGF-β) family are involved in a variety of cellular processes. Growth factor binding to type II receptors leads to type I receptor phosphorylation and activation (Denicourt, C. et al., Another twist in the transforming growth factor β-induced cell-cycle arrest chronicle. PNAS. 2003. 100(26):15290-1). Activated type I receptors may in turn phosphorylate receptor-associated SMADs (R-SMADs) promoting co-SMAD (e.g. SMAD4) dimer/trimer formation and nuclear translocation. SMAD complexes collaborate with cofactors to modulate expression of TGF-β family member target genes.

[0033] TGF-β family member signaling cascades are involved in a number of diverse biological pathways including, but not limited to inhibition of cell growth, tissue homeostasis, extracellular matrix (ECM) remodeling, endothelial to mesenchymal transition (EMT) in cell migration and invasion and immune modulation/suppression as well as in mesenchymal to epithelial transition. TGF-β signaling related to growth inhibition and tissue homeostasis may affect epithelial, endothelial, hematopoietic and immune cells through the activation of p21 and p15^{INK} to mediate cell cycle arrest and repress myc. In relation to ECM remodeling, TGF-β signaling may increase fibroblast populations and ECM deposition (e.g. collagen). TGF-β signaling related to cell migration and invasion may affect epithelial and/or endothelial cells, inducing stem cell-like phenotypes. This aspect of signaling may play a role in smooth muscle cell proliferation following vascular surgery and/or stenting. In the immune system, TGF-β ligand is necessary for T regulatory cell function and maintenance of immune precursor cell growth and homeostasis. Nearly all immune cells comprise receptors for TGF-β and TGF-β knockout mice die postnataly due in part to inflammatory pathologies. Finally, TGF-β suppresses interferon gamma-induced activation of natural killer cells (Wi, J. et al., 2011. Hepatology. 53(4):1342-51, the contents of which are herein incorporated by reference in their entirety).

[0034] The solution of the crystal structure of the latent form of TGF-beta is a first for the entire TGF-beta family and offers deep insights into these complexes (Shi, M. et al., Latent TGF-β structure and activation. Nature. 2011 Jun. 15; 474(7351):343-9). Almost all signaling in the TGF-beta family goes through a common pathway whereby a dimeric ligand is recognized by a heterotetrameric receptor complex containing two type I and two type II receptors. Each receptor has a serine-threonine kinase domain. Type II receptors phosphorylate type I receptors, which in turn phosphorylate receptor-regulated Smads that translocate to and accumulate in the nucleus and regulate transcription.

[0035] There are 33 different members of the TGF-beta family in humans (FIG. 1). Members include the bone morphogenetic proteins (BMP), inhibin, activin, growth and differentiation factor (GDF), myostatin, nodal, anti-Mullerian hormone, and lefty proteins. A review of TGF-β family members, related signaling molecules as well as their relationships can be found in Massague., 2000. Nature Reviews Molecular Cell Biology. 1:169-78, the contents of which are herein incorporated by reference in their entirety. In some embodiments, mature growth factors are synthesized along with their prodomains as single polypeptide chains (see FIG. 2). In some embodiments, such polypeptide chains may comprise cleavage sites for separation of prodomains from mature growth factors. In some embodiments, such cleavage sites are furin cleavage sites recognized and cleaved by proprotein convertases.

[0036] In general, homology among TGF-β family member growth factor domains is relatively high. Interestingly, prodomain homology is much lower. This lack of homology may be an important factor in altered growth factor regulation among family members. In some cases, prodomains may guide proper folding and/or dimerization of growth factor domains. Prodomains have very recently been recognized, in some cases, to have important functions in directing growth factors (after secretion) to specific locations in the extracellular matrix (ECM) and/or cellular matrix, until other signals are received that cause growth factor release from latency. Release from latency may occur in highly localized environments whereby growth factors may act over short distances (e.g. from about 1 cell diameter to about a few cell diameters, from about 2 cell diameters to about 100 cell diameters and/or from about 10 cell diameters to about 10,000 cell diameters) and cleared once they reach the circulation. Some growth factor-prodomain complexes are secreted as homodimers. In some embodiments, prodomain-growth factor complexes may be secreted as heterodimers.

[0037] Described herein are compounds for the modulation of growth factor activity and/or levels. Part of the invention includes methods of using growth factor activating antibodies to increase the levels of free growth factor in biological systems. In other aspects, the invention includes targeting complexes that are capable of modulating growth factor activity at distinct target sites.

[0038] As used herein, the term “TGF-β-related protein” refers to a TGF-β isoform, a TGF-β family member or a TGF-β family member-related protein. TGF-β family members may include, but are not limited to any of those shown in in FIG. 1 and/or listed in Table 1. These include, but are not limited to TGF-β proteins, BMPs, myostatin, GDFs and inhibins. Aspects of the present invention provide tools and/or methods for characterizing and/or modulating cellular activities related to growth factor signaling. In other embodiments, tools of the present invention may comprise antigens comprising one or more components of one or more TGF-β-related proteins. Some tools may comprise antibodies directed toward antigens of the present invention. In additional embodiments, tools of the present invention may comprise assays for the detection and/or characterization of TGF-β-related proteins, the detection and/or characterization of antibodies directed toward TGF-β-related proteins and/or the detection and/or characterization of cellular activities and/or their cellular signaling related to TGF-β-related proteins.

### Proteins of Interest

[0039] TGF-β-related proteins are involved in a number of cellular processes. In embryogenesis, the 33 members of the TGF-β family of proteins are involved in regulating major developmental processes and the details of the formation of many organs. Much of this regulation occurs before birth; however, the family continues to regulate many processes after birth, including, but not limited to immune responses, wound healing, bone growth, endocrine functions and muscle mass. TGF-β-related proteins are listed and described in International Patent Application No. WO2014074532, the contents of which are herein incorporated by reference in their entirety.

[0040] A list of exemplary TGF-β family pro-proteins, i.e. the protein after removal of the secretion signal sequence, is shown in Table 1. The pro-protein contains, and is the precursor of, the prodomain and the growth factor. Shown in the Table are the names of the originating TGF-β family member and the pro-protein sequence. Also identified in “bold” and “underlined” are proprotein convertase cleavage sites. Upon cleavage, the resulting prodomain retains this site, whereas the mature growth factor begins following the cleavage site. It is noted that Lefty1 and Lefty2 are not cleaved by proprotein convertases just prior to the start of the mature growth factor.

TABLE 1
Pro-proteins of the TGF-beta family

| | | SEQ |
|---|---|---|
| | | ID |
| TGF Member | Prodomain and growth factor Sequence | NO |
| TGF-β1 | LSTCKTIDMELVKRKRIEAIRGQILSKLRLASPPSQGEVPPGPL | 1 |
| | PEAVLALYNSTRDRVAGESAEPEPEPEADYYAKEVTRVLMV | |
| | ETHNEIYDKFKQSTHSIYMFFNTSELREAVPEPVLLSRAELRL | |
| | LRLKLKVEQHVELYQKYSNNSWRYLSNRLLAPSDSPEWLSF | |
| | DVTGVVRQWLSRGGEIEGFRLSAHCSCDSRDNTLQVDINGFT | |
| | TGRRGDLATIHGMNRPFLLLMATPLERAQHLQSSRHRRALD | |
| | TNYCFSSTEKNCCVRQLYIDFRKDLGWKWIHEPKGYHANFC | |
| | LGPCPYIWSLDTQYSKVLALYNQHNPGASAAPCCVPQALEPL | |
| | PIVYYVGRKPKVEQLSNMIVRSCKCS | |
| TGF-β2 | SLSTCSTLDMDQFMRKRIEAIRGQILSKLKLTSPPEDYPEPEEV | 2 |
| | PPEVISIYNSTRDLLQEKASRRAAACERERSDEEYYAKEVYKI | |
| | DMPPFFPSENAIPPTFYRPYFRIVRFDVSAMEKNASNLVKAEF | |
| | RVFRLQNPKARVPEQRIELYQILKSKDLTSPTQRYIDSKVVKT | |
| | RAEGEWLSFDVTDAVHEWLHHKDRNLGFKISLHCPCCTFVP | |
| | SNNYIIPNKSEELEARFAGIDGTSTYTSGDQKTIKSTRKKNSG | |
| | KTPHLLLMLLPSYRLESQQTNRRKKRALDAAYCFRNVQDN | |
| | CCLRPLYIDFKRDLGWKWIHEPKGYNANFCAGACPYLWSSD | |
| | TQHSRVLSLYNTINPEASASPCCVSQDLEPLTILYYIGKTPKIE | |
| | QLSNMIVKSCKCS | |
| TGF-β3 | SLSLSTCTTLDFGHIKKKRVEAIRGQILSKLRLTSPPEPTVMTH | 3 |
| | VPYQVLALYNSTRELLEEMHGEREEGCTQENTESEYYAKEIH | |
| | KFDMIQGLAEHNELAVCPKGITSKVFRFNVSSVEKNRTNLFR | |
| | AEFRVLRVPNPSSKRNEQRIELFQILRPDEHIAKQRYIGGKNL | |
| | PTRGTAEWLSFDVTDTVREWLLRRESNLGLEISIHCPCHTFQP | |
| | NGDILENIHEVMEIKFKGVDNEDDHGRGDLGRLKKQKDHHN | |
| | PHLILMMIPPHRLDNPGQGGQRKKRALDTNYCFRNLEENCC | |
| | VRPLYIDFRQDLGWKWVHEPKGYYANFCSGPCPYLRSADTT | |
| | HSTVLGLYNTLNPEASASPCCVPQDLEPLTILYYVGRTPKVE | |
| | QLSNMVVKSCKCS | |
| GDF-11 | AEGPAAAAAAAAAAAAAGVGGERSSRPAPSVAPEPDGCPV | 4 |
| | CVWRQHSRELRLESIKSQILSKLRLKEAPNISREVVKQLLPKA | |
| | PPLQQILDLHDFQGDALQPEDFLEEDEYHATTETVISMAQET | |
| | DPAVQTDGSPLCCHFHFSPKVMFTKVLKAQLWVYLRPVPRP | |
| | ATVYLQILRLKPLTGEGTAGGGGGGRRHIRIRSLKIELHSRSG | |
| | HWQSIDFKQVLHSWFRQPQSNWGIEINAFDPSGTDLAVTSLG | |
| | PGAEGLHPFMELRVLENTKRSRRNLGLDCDEHSSESRCCRYP | |
| | LTVDFEAFGWDWIIAPKRYKANYCSGQCEYMFMQKYPHTH | |
| | LVQQANPRGSAGPCCTPTKMSPINMLYFNDKQQIIYGKIPGM | |
| | VVDRCGCS | |
| GDF-8 | NENSEQKENVEKEGLCNACTWRQNTKSSRIEAIKIQILSKLRL | 5 |
| (myostatin) | ETAPNISKDVIRQLLPKAPPLRELIDQYDVQRDDSSDGSLEDD | |
| | DYHATTETIITMPTESDFLMQVDGKPKCCFFKFSSKIQYNKV | |
| | VKAQLWIYLRPVETPTTVFVQILRLIKPMKDGTRYTGIRSLKL | |
| | DMNPGTGIWQSIDVKTVLQNWLKQPESNLGIEIKALDENGH | |
| | DLAVTFPGPGEDGLNPFLEVKVTDTPKRSRRDFGLDCDEHST | |
| | ESRCCRYPLTVDFEAFGWDWIIAPKRYKANYCSGECEFVFLQ | |
| | KYPHTHLVHQANPRGSAGPCCTPTKMSPINMLYFNGKEQIIY | |
| | GKIPAMVVDRCGCS | |
| Inhibin-beta A | SPTPGSEGHSAAPDCPSCALAALPKDVPNSQPEMVEAVKKHI | 6 |
| | LNMLHLKKRPDVTQPVPKAALLNAIRKLHVGKVGENGYVEI | |
| | EDDIGRRAEMNELMEQTSEIITFAESGTARKTLHFEISKEGSD | |
| | LSVVERAEVWLFLKVPKANRTRTKVTIRLFQQQKHPQGSLD | |
| | TGEEAEEVGLKGERSELLLSEKVVDARKSTWHVFPVSSSIQR | |
| | LLDQGKSSLDVRIACEQCQESGASLVLLGKKKKKEEEGEGK | |
| | KKGGGEGGAGADEEKEQSHRPFLMLQARQSEDHPHRRRRR | |
| | GLECDGKVNICCKKQFFVSFKDIGWNDWIIAPSGYHANYCE | |
| | GECPSHIAGTSGSSLSFHSTVINHYRMRGHSPFANLKSCCVPT | |
| | KLRPMSMLYYDDGQNIIKKDIQNMIVEECGCS | |
| Inhibin-beta B | SPTPPPTPAAPPPPPPPGSPGGSQDTCTSCGGFRRPEELGRVDG | 7 |
| | DFLEAVKRHILSRLQMRGRPNITHAVPKAAMVTALRKLHAG | |
| | KVREDGRVEIPHLDGHASPGADGQERVSEIISFAETDGLASSR | |
| | VRLYFFISNEGNQNLFVVQASLWLYLKLLPYVLEKGSRRKV | |
| | RVKVYFQEQGHGDRWNMVEKRVDLKRSGWHTFPLTEAIQA | |
| | LFERGERRLNLDVQCDSCQELAVVPVFVDPGEESHRPFVVV | |
| | QARLGDSRHRIRKRGLECDGRTNLCCRQQFFIDFRLIGWND | |
| | WIIAPTGYYGNYCEGSCPAYLAGVPGSASSFHTAVVNQYRM | |
| | RGLNPGTVNSCCIPTKLSTMSMLYFDDEYNIVKRDVPNMIVE | |
| | ECGCA | |
| Inhibin-beta C | TPRAGGQCPACGGPTLELESQRELLLDLAKRSILDKLHLTQR | 8 |
| | PTLNRPVSRAALRTALQHLHGVPQGALLEDNREQECEIISFAE | |
| | TGLSTINQTRLDFHFSSDRTAGDREVQQASLMFFVQLPSNTT | |
| | WTLKVRVLVLGPHNTNLTLATQYLLEVDASGWHQLPLGPE | |
| | AQAACSQGHLTLELVLEGQVAQSSVILGGAAHRPFVAARVR | |
| | VGGKHQIHRRGIDCQGGSRMCCRQEFFVDFREIGWHDWIIQ | |
| | PEGYAMNFCIGQCPLHIAGMPGIAASFHTAVLNLLKANTAAG | |
| | TTGGGSCCVPTARRPLSLLYYDRDSNIVKTDIPDMVVEACGCS | |
| Inhibin-beta E | QGTGSVCPSCGGSKLAPQAERALVLELAKQQILDGLHLTSRP | 9 |
| | RITHPPPQAALTRALRRLQPGSVAPGNGEEVISFATVTDSTSA | |
| | YSSLLTFHLSTPRSHHLYHARLWLHVLPTLPGTLCLRIFRWGP | |
| | RRRRQGSRTLLAEHHITNLGWHTLTLPSSGLRGEKSGVLKLQ | |
| | LDCRPLEGNSTVTGQPRRLLDTAGHQQPFLELKIRANEPGAG | |
| | RARRRTPTCEPATPLCCRRDHYVDFQELGWRDWILQPEGYQ | |
| | LNYCSGQCPPHLAGSPGIAASFHSAVFSLLKANNPWPASTSC | |
| | CVPTARRPLSLLYLDHNGNVVKTDVPDMVVEACGCS | |
| Lefty1 | LTGEQLLGSLLRQLQLKEVPTLDRADMEELVIPTHVRAQYV | 10 |
| | ALLQRSHGDRSRGKRFSQSFREVAGRFLALEASTHLLVFGM | |
| | EQRLPPNSELVQAVLRLFQEPVPKAALHRHGRLSPRSARAR | |
| | VTVEWLRVRDDGSNRTSLIDSRLVSVHESGWKAFDVTEAVN | |
| | FWQQLSRPRQPLLLQVSVQREHLGPLASGAHKLVRFASQGA | |
| | PAGLGEPQLELHTLDLGDYGAQGDCDPEAPMTEGTRCCRQE | |
| | MYIDLQGMKWAENWVLEPPGFLAYECVGTCRQPPEALAFK | |
| | WPFLGPRQCIASETDSLPMIVSIKEGGRTRPQVVSLPNMRVQ | |
| | KCSCASDGALVPRRLQP | |
| Lefty2 | LTEEQLLGSLLRQLQLSEVPVLDRADMEKLVIPAHVRAQYV | 11 |
| | VLLRRSHGDRSRGKRFSQSFREVAGRFLASEASTHLLVFGM | |
| | EQRLPPNSELVQAVLRLFQEPVPKAALHRHGRLSPRSAQAR | |
| | VTVEWLRVRDDGSNRTSLIDSRLVSVHESGWKAFDVTEAVN | |
| | FWQQLSRPRQPLLLQVSVQREHLGPLASGAHKLVRFASQGA | |
| | PAGLGEPQLELHTLDLRDYGAQGDCDPEAPMTEGTRCCRQE | |
| | MYIDLQGMKWAKNWVLEPPGFLAYECVGTCQQPPEALAFN | |
| | WPFLGPRQCIASETASLPMIVSIKEGGRTRPQVVSLPNMRVQ | |
| | KCSCASDGALVPRRLQP | |
| GDF-15 | LSLAEASRASFPGPSELHSEDSRFRELRKRYEDLLTRLRANQS | 12 |
| | WEDSNTDLVPAPAVRILTPEVRLGSGGHLHLRISRAALPEGLP | |
| | EASRLHRALFRLSPTASRSWDVTRPLRRQLSLARPQAPALHL | |
| | RLSPPPSQSDQLLAESSSARPQLELHLRPQAARGRRRARARN | |
| | GDHCPLGPGRCCRLHTVRASLEDLGWADWVLSPREVQVTM | |
| | CIGACPSQFRAANMHAQIKTSLHRLKPDTVPAPCCVPASYNP | |
| | MVLIQKTDTGVSLQTYDDLLAKDCHCI | |
| Anti-Mullerian | LLGTEALRAEEPAVGTSGLIFREDLDWPPGIPQEPLCLVALGG | 13 |
| hormone | DSNGSSSPLRVVGALSAYEQAFLGAVQRARWGPRDLATFGV | |
| | CNTGDRQAALPSLRRLGAWLRDPGGQRLVVLHLEEVTWEPT | |
| | PSLRFQEPPPGGAGPPELALLVLYPGPGPEVTVTRAGLPGAQS | |
| | LCPSRDTRYLVLAVDRPAGAWRGSGLALTLQPRGEDSRLST | |
| | ARLQALLFGDDHRCFTRMTPALLLLPRSEPAPLPAHGQLDTV | |
| | PFPPPRPSAELEESPPSADPFLETLTRLVRALRVPPARASAPRL | |
| | ALDPDALAGFPQGLVNLSDPAALERLLDGEEPLLLLLRPTAA | |
| | TTGDPAPLHDPTSAPWATALARRVAAELQAAAAELRSLPGL | |
| | PPATAPLLARLLALCPGGPGGLGDPLRALLLLKALQGLRVE | |
| | WRGRDPRGPGRAQRSAGATAADGPCALRELSVDLRAERSV | |
| | LIPETYQANNCQGVCGWPQSDRNPRYGNHVVLLLKMQVRG | |
| | AALARPPCCVPTAYAGKLLISLSEERISAHHVPNMVATECGCR | |
| Inhibin-alpha | CQGLELARELVLAKVRALFLDALGPPAVTREGGDPGVRRLP | 14 |
| | RRHALGGFTHRGSEPEEEEDVSQAILFPATDASCEDKSAARG | |
| | LAQEAEEGLFRYMFRPSQHTRSRQVTSAQLWFHTGLDRQGT | |
| | AASNSSEPLLGLLALSPGGPVAVPMSLGHAPPHWAVLHLATS | |
| | ALSLLTHPVLVLLLRCPLCTCSARPEATPFLVAHTRTRPPSGG | |
| | ERARRSTPLMSWPWSPSALRLLQRPPEEPAAHANCHRVALN | |
| | ISFQELGWERWIVYPPSFIFHYCHGGCGLHIPPNLSLPVPGAPP | |
| | TPAQPYSLLPGAQPCCAALPGTMRPLHVRTTSDGGYSFKYET | |
| | VPNLLTQHCACI | |
| GDF-1 | PVPPGPAAALLQALGLRDEPQGAPRLRPVPPVMWRLFRRRD | 15 |
| | PQETRSGSRRTSPGVTLQPCHVEELGVAGNIVRHIPDRGAPTR | |
| | ASEPASAAGHCPEWTVVFDLSAVEPAERPSRARLELRFAAAA | |
| | AAAPEGGWELSVAQAGQGAGADPGPVLLRQLVPALGPPVR | |
| | AELLGAAWARNASWPRSLRLALALRPRAPAACARLAEASLL | |
| | LVTLDPRLCHPLARPRRDAEPVLGGGPGGACRARRLYVSFR | |
| | EVGWHRWVIAPRGFLANYCQGQCALPVALSGSGGPPALNH | |
| | AVLRALMHAAAPGAADLPCCVPARLSPISVLFFDNSDNVVL | |
| | RQYEDMVVDECGCR | |
| GDF-3 | QEYVFLQFLGLDKAPSPQKFQPVPYILKKIFQDREAAATTGV | 16 |
| | SRDLCYVKELGVRGNVLRFLPDQGFFLYPKKISQASSCLQKL | |
| | LYFNLSAIKEREQLTLAQLGLDLGPNSYYNLGPELELALFLV | |
| | QEPHVWGQTTPKPGKMFVLRSVPWPQGAVHFNLLDVAKD | |
| | WNDNPRKNFGLFLEILVKEDRDSGVNFQPEDTCARLRCSLH | |
| | ASLLVVTLNPDQCHPSRKRRAAIPVPKLSCKNLCHRHQLFIN | |
| | FRDLGWHKWIIAPKGFMANYCHGECPFSLTISLNSSNYAFMQ | |
| | ALMHAVDPEIPQAVCIPTKLSPISMLYQDNNDNVILRHYEDM | |
| | VVDECGCG | |
| GDF-5 | APDLGQRPQGTRPGLAKAEAKERPPLARNVFRPGGHSYGGG | 17 |
| | ATNANARAKGGTGQTGGLTQPKKDEPKKLPPRPGGPEPKPG | |
| | HPPQTRQATARTVTPKGQLPGGKAPPKAGSVPSSFLLKKARE | |
| | PGPPREPKEPFRPPPITPHEYMLSLYRTLSDADRKGGNSSVKL | |
| | EAGLANTITSFIDKGQDDRGPVVRKQRYVFDISALEKDGLLG | |
| | AELRILRKKPSDTAKPAAPGGGRAAQLKLSSCPSGRQPASLL | |
| | DVRSVPGLDGSGWEVFDIWKLFRNFKNSAQLCLELEAWERG | |
| | RAVDLRGLGFDRAARQVHEKALFLVFGRTKKRDLFFNEIKA | |
| | RSGQDDKTVYEYLFSQRRKRRAPLATRQGKRPSKNLKARCS | |
| | RKALHVNFKDMGWDDWIIAPLEYEAFHCEGLCEFPLRSHLE | |
| | PTNHAVIQTLMNSMDPESTPPTCCVPTRLSPISILFIDSANNVV | |
| | YKQYEDMVVESCGCR | |
| GDF-6 | FQQASISSSSSSAELGSTKGMRSRKEGKMQRAPRDSDAGREG | 18 |
| | QEPQPRPQDEPRAQQPRAQEPPGRGPRVVPHEYMLSIYRTYSI | |
| | AEKLGINASFFQSSKSANTITSFVDRGLDDLSHTPLRRQKYLF | |
| | DVSMLSDKEELVGAELRLFRQAPSAPWGPPAGPLHVQLFPCL | |
| | SPLLLDARTLDPQGAPPAGWEVFDVWQGLRHQPWKQLCLE | |
| | LRAAWGELDAGEAEARARGPQQPPPPDLRSLGFGRRVRPPQ | |
| | ERALLVVFTRSQRKNLFAEMREQLGSAEAAGPGAGAEGSWP | |
| | PPSGAPDARPWLPSPGRRRRRTAFASRHGKRHGKKSRLRCS | |
| | KKPLHVNFKELGWDDWIIAPLEYEAYHCEGVCDFPLRSHLEP | |
| | TNHAIIQTLMNSMDPGSTPPSCCVPTKLTPISILYIDAGNNVV | |
| | YKQYEDMVVESCGCR | |
| GDF-7 | RDGLEAAAVLRAAGAGPVRSPGGGGGGGGGGRTLAQAAGA | 19 |
| | AAVPAAAVPRARAARRAAGSGFRNGSVVPHHFMMSLYRSL | |
| | AGRAPAGAAAVSASGHGRADTITGFTDQATQDESAAETGQS | |
| | FLFDVSSLNDADEVVGAELRVLRRGSPESGPGSWTSPPLLLLS | |
| | TCPGAARAPRLLYSRAAEPLVGQRWEAFDVADAMRRHRRE | |
| | PRPPRAFCLLLRAVAGPVPSPLALRRLGFGWPGGGGSAAEER | |
| | AVLVVSSRTQRKESLFREIRAQARALGAALASEPLPDPGTGT | |
| | ASPRAVIGGRRRRRTALAGTRTAQGSGGGAGRGHGRRGRS | |
| | RCSRKPLHVDFKELGWDDWIIAPLDYEAYHCEGLCDFPLRSH | |
| | LEPTNHAIIQTLLNSMAPDAAPASCCVPARLSPISILYIDAANN | |
| | VVYKQYEDMVVEACGCR | |
| BMP-10 | SPIMNLEQSPLEEDMSLFGDVFSEQDGVDFNTLLQSMKDEFL | 20 |
| | KTLNLSDIPTQDSAKVDPPEYMLELYNKFATDRTSMPSANIIR | |
| | SFKNEDLFSQPVSFNGLRKYPLLFNVSIPHHEEVIMAELRLYT | |
| | LVQRDRMIYDGVDRKITIFEVLESKGDNEGERNMLVLVSGEI | |
| | YGTNSEWETFDVTDAIRRWQKSGSSTHQLEVHIESKHDEAE | |
| | DASSGRLEIDTSAQNKHNPLLIVFSDDQSSDKERKEELNEMIS | |
| | HEQLPELDNLGLDSFSSGPGEEALLQMRSNIIYDSTARIRRNA | |
| | KGNYCKRTPLYIDFKEIGWDSWIIAPPGYEAYECRGVCNYPL | |
| | AEHLTPTKHAIIQALVHLKNSQKASKACCVPTKLEPISILYLD | |
| | KGVVTYKFKYEGMAVSECGCR | |
| BMP-9 (GDF-2) | KPLQSWGRGSAGGNAHSPLGVPGGGLPEHTFNLKMFLENVK | 21 |
| | VDFLRSLNLSGVPSQDKTRVEPPQYMIDLYNRYTSDKSTTPA | |
| | SNIVRSFSMEDAISITATEDFPFQKHILLFNISIPRHEQITRAELR | |
| | LYVSCQNHVDPSHDLKGSVVIYDVLDGTDAWDSATETKTFL | |
| | VSQDIQDEGWETLEVSSAVKRWVRSDSTKSKNKLEVTVESH | |
| | RKGCDTLDISVPPGSRNLPFFVVFSNDHSSGTKETRLELREMI | |
| | SHEQESVLKKLSKDGSTEAGESSHEEDTDGHVAAGSTLARR | |
| | KRSAGAGSHCQKTSLRVNFEDIGWDSWIIAPKEYEAYECKG | |
| | GCFFPLADDVTPTKHAIVQTLVHLKFPTKVGKACCVPTKLSPI | |
| | SVLYKDDMGVPTLKYHYEGMSVAECGCR | |
| Nodal | TVATALLRTRGQPSSPSPLAYMLSLYRDPLPRADIIRSLQAED | 22 |
| | VAVDGQNWTFAFDFSFLSQQEDLAWAELRLQLSSPVDLPTE | |
| | GSLAIEIFHQPKPDTEQASDSCLERFQMDLFTVTLSQVTFSLG | |
| | SMVLEVTRPLSKWLKRPGALEKQMSRVAGECWPRPPTPPAT | |
| | NVLLMLYSNLSQEQRQLGGSTLLWEAESSWRAQEGQLSWE | |
| | WGKRHRRHHLPDRSQLCRKVKFQVDFNLIGWGSWIIYPKQ | |
| | YNAYRCEGECPNPVGEEFHPTNHAYIQSLLKRYQPHRVPSTC | |
| | CAPVKTKPLSMLYVDNGRVLLDHHKDMIVEECGCL | |
| BMP-2 | LVPELGRRKFAAASSGRPSSQPSDEVLSEFELRLLSMFGLKQR | 23 |
| | PTPSRDAVVPPYMLDLYRRHSGQPGSPAPDHRLERAASRAN | |
| | TVRSFHHEESLEELPETSGKTTRRFFFNLSSIPTEEFITSAELQV | |
| | FREQMQDALGNNSSFHHRINIYEIIKPATANSKFPVTRLLDTR | |
| | LVNQNASRWESFDVTPAVMRWTAQGHANHGFVVEVAHLE | |
| | EKQGVSKRHVRISRSLHQDEHSWSQIRPLLVTFGHDGKGHPL | |
| | HKREKRQAKHKQRKRLKSSCKRHPLYVDFSDVGWNDWIV | |
| | APPGYHAFYCHGECPFPLADHLNSTNHAIVQTLVNSVNSKIP | |
| | KACCVPTELSAISMLYLDENEKVVLKNYQDMVVEGCGCR | |
| BMP-4 | GASHASLIPETGKKKVAEIQGHAGGRRSGQSHELLRDFEATL | 24 |
| | LQMFGLRRRPQPSKSAVIPDYMRDLYRLQSGEEEEEQIHSTG | |
| | LEYPERPASRANTVRSFHHEEHLENIPGTSENSAFRFLFNLSSI | |
| | PENEVISSAELRLFREQVDQGPDWERGFHRINIYEVMKPPAE | |
| | VVPGHLITRLLDTRLVHHNVTRWETFDVSPAVLRWTREKQP | |
| | NYGLAIEVTHLHQTRTHQGQHVRISRSLPQGSGNWAQLRPL | |
| | LVTFGHDGRGHALTRRRRAKRSPKHHSQRARKKNKNCRRH | |
| | SLYVDFSDVGWNDWIVAPPGYQAFYCHGDCPFPLADHLNST | |
| | NHAIVQTLVNSVNSSIPKACCVPTELSAISMLYLDEYDKVVL | |
| | KNYQEMVVEGCGCR | |
| BMP-5 | DNHVHSSFIYRRLRNHERREIQREILSILGLPHRPRPFSPGKQA | 25 |
| | SSAPLFMLDLYNAMTNEENPEESEYSVRASLAEETRGARKG | |
| | YPASPNGYPRRIQLSRTTPLTTQSPPLASLHDTNFLNDADMV | |
| | MSFVNLVERDKDFSHQRRHYKEFRFDLTQIPHGEAVTAAEFR | |
| | IYKDRSNNRFENETIKISIYQIIKEYTNRDADLFLLDTRKAQAL | |
| | DVGWLVFDITVTSNHWVINPQNNLGLQLCAETGDGRSINVK | |
| | SAGLVGRQGPQSKQPFMVAFFKASEVLLRSVRAANKRKNQ | |
| | NRNKSSSHQDSSRMSSVGDYNTSEQKQACKKHELYVSFRDL | |
| | GWQDWIIAPEGYAAFYCDGECSFPLNAHMNATNHAIVQTLV | |
| | HLMFPDHVPKPCCAPTKLNAISVLYFDDSSNVILKKYRNMV | |
| | VRSCGCH | |
| BMP-6 | CCGPPPLRPPLPAAAAAAAGGQLLGDGGSPGRTEQPPPSPQS | 26 |
| | SSGFLYRRLKTQEKREMQKEILSVLGLPHRPRPLHGLQQPQP | |
| | PALRQQEEQQQQQQLPRGEPPPGRLKSAPLFMLDLYNALSA | |
| | DNDEDGASEGERQQSWPHEAASSSQRRQPPPGAAHPLNRKS | |
| | LLAPGSGSGGASPLTSAQDSAFLNDADMVMSFVNLVEYDKE | |
| | FSPRQRHHKEFKFNLSQIPEGEVVTAAEFRIYKDCVMGSFKN | |
| | QTFLISIYQVLQEHQHRDSDLFLLDTRVVWASEEGWLEFDIT | |
| | ATSNLWVVTPQHNMGLQLSVVTRDGVHVHPRAAGLVGRD | |
| | GPYDKQPFMVAFFKVSEVHVRTTRSASSRRRQQSRNRSTQS | |
| | QDVARVSSASDYNSSELKTACRKHELYVSFQDLGWQDWIIA | |
| | PKGYAANYCDGECSFPLNAHMNATNHAIVQTLVHLMNPEY | |
| | VPKPCCAPTKLNAISVLYFDDNSNVILKKYRNMVVRACGCH | |
| BMP-7 | DFSLDNEVHSSFIHRRLRSQERREMQREILSILGLPHRPRPHLQ | 27 |
| | GKHNSAPMFMLDLYNAMAVEEGGGPGGQGFSYPYKAVFST | |
| | QGPPLASLQDSHFLTDADMVMSFVNLVEHDKEFFHPRYHHR | |
| | EFRFDLSKIPEGEAVTAAEFRIYKDYIRERFDNETFRISVYQVL | |
| | QEHLGRESDLFLLDSRTLWASEEGWLVFDITATSNHWVVNP | |
| | RHNLGLQLSVETLDGQSINPKLAGLIGRHGPQNKQPFMVAFF | |
| | KATEVHFRSIRSTGSKQRSQNRSKTPKNQEALRMANVAENS | |
| | SSDQRQACKKHELYVSFRDLGWQDWIIAPEGYAAYYCEGEC | |
| | AFPLNSYMNATNHAIVQTLVHFINPETVPKPCCAPTQLNAISV | |
| | LYFDDSSNVILKKYRNMVVRACGCH | |
| BMP-8A | GGGPGLRPPPGCPQRRLGARERRDVQREILAVLGLPGRPRPR | 28 |
| | APPAASRLPASAPLFMLDLYHAMAGDDDEDGAPAEQRLGR | |
| | ADLVMSFVNMVERDRALGHQEPHWKEFRFDLTQIPAGEAVT | |
| | AAEFRIYKVPSIHLLNRTLHVSMFQVVQEQSNRESDLFFLDL | |
| | QTLRAGDEGWLVLDVTAASDCWLLKRHKDLGLRLYVETED | |
| | GHSVDPGLAGLLGQRAPRSQQPFVVTFFRASPSPIRTPRAVR | |
| | PLRRRQPKKSNELPQANRLPGIFDDVRGSHGRQVCRRHELYV | |
| | SFQDLGWLDWVIAPQGYSAYYCEGECSFPLDSCMNATNHAI | |
| | LQSLVHLMKPNAVPKACCAPTKLSATSVLYYDSSNNVILRK | |
| | HRNMVVKACGCH | |
| BMP-8B | GGGPGLRPPPGCPQRRLGARERRDVQREILAVLGLPGRPRPR | 29 |
| | APPAASRLPASAPLFMLDLYHAMAGDDDEDGAPAERRLGRA | |
| | DLVMSFVNMVERDRALGHQEPHWKEFRFDLTQIPAGEAVTA | |
| | AEFRIYKVPSIHLLNRTLHVSMFQVVQEQSNRESDLFFLDLQT | |
| | LRAGDEGWLVLDVTAASDCWLLKRHKDLGLRLYVETEDGH | |
| | SVDPGLAGLLGQRAPRSQQPFVVTFFRASPSPIRTPRAVRPLR | |
| | RRQPKKSNELPQANRLPGIFDDVHGSHGRQVCRRHELYVSF | |
| | QDLGWLDWVIAPQGYSAYYCEGECSFPLDSCMNATNHAILQ | |
| | SLVHLMMPDAVPKACCAPTKLSATSVLYYDSSNNVILRKHR | |
| | NMVVKACGCH | |
| BMP-15 | MEHRAQMAEGGQSSIALLAEAPTLPLIEELLEESPGEQPRKPR | 30 |
| | LLGHSLRYMLELYRRSADSHGHPRENRTIGATMVRLVKPLTS | |
| | VARPHRGTWHIQILGFPLRPNRGLYQLVRATVVYRHHLQLT | |
| | RFNLSCHVEPWVQKNPTNHFPSSEGDSSKPSLMSNAWKEMD | |
| | ITQLVQQRFWNNKGHRILRLRFMCQQQKDSGGLELWHGTSS | |
| | LDIAFLLLYFNDTHKSIRKAKFLPRGMEEFMERESLLRRTRQ | |
| | ADGISAEVTASSSKHSGPENNQCSLHPFQISFRQLGWDHWIIA | |
| | PPFYTPNYCKGTCLRVLRDGLNSPNHAIIQNLINQLVDQSVPR | |
| | PSCVPYKYVPISVLMIEANGSILYKEYEGMIAESCTCR | |
| GDF-9 | SQASGGEAQIAASAELESGAMPWSLLQHIDERDRAGLLPALF | 31 |
| | KVLSVGRGGSPRLQPDSRALHYMKKLYKTYATKEGIPKSNR | |
| | SHLYNTVRLFTPCTRHKQAPGDQVTGILPSVELLFNLDRITTV | |
| | EHLLKSVLLYNINNSVSFSSAVKCVCNLMIKEPKSSSRTLGRA | |
| | PYSFTFNSQFEFGKKHKWIQIDVTSLLQPLVASNKRSIHMSIN | |
| | FTCMKDQLEHPSAQNGLFNMTLVSPSLILYLNDTSAQAYHS | |
| | WYSLHYKRRPSQGPDQERSLSAYPVGEEAAEDGRSSHHRHR | |
| | RGQETVSSELKKPLGPASFNLSEYFRQFLLPQNECELHDFRLS | |
| | FSQLKWDNWIVAPHRYNPRYCKGDCPRAVGHRYGSPVHTM | |
| | VQNIIYEKLDSSVPRPSCVPAKYSPLSVLTIEPDGSIAYKEYED | |
| | MIATKCTCR | |
| BMP-3 | ERPKPPFPELRKAVPGDRTAGGGPDSELQPQDKVSEHMLRLY | 32 |
| | DRYSTVQAARTPGSLEGGSQPWRPRLLREGNTVRSFRAAAA | |
| | ETLERKGLYIFNLTSLTKSENILSATLYFCIGELGNISLSCPVSG | |
| | GCSHHAQRKHIQIDLSAWTLKFSRNQSQLLGHLSVDMAKSH | |
| | RDIMSWLSKDITQLLRKAKENEEFLIGFNITSKGRQLPKRRLP | |
| | FPEPYILVYANDAAISEPESVVSSLQGHRNFPTGTVPKWDSHI | |
| | RAALSIERRKKRSTGVLLPLQNNELPGAEYQYKKDEVWEER | |
| | KPYKTLQAQAPEKSKNKKKQRKGPHRKSQTLQFDEQTLKK | |
| | ARRKQWIEPRNCARRYLKVDFADIGWSEWIISPKSFDAYYCS | |
| | GACQFPMPKSLKPSNHATIQSIVRAVGVVPGIPEPCCVPEKMS | |
| | SLSILFFDENKNVVLKVYPNMTVESCACR | |
| GDF-10 | SHRAPAWSALPAAADGLQGDRDLQRHPGDAAATLGPSAQD | 33 |
| | MVAVHMHRLYEKYSRQGARPGGGNTVRSFRARLEVVDQK | |
| | AVYFFNLTSMQDSEMILTATFHFYSEPPRWPRALEVLCKPRA | |
| | KNASGRPLPLGPPTRQHLLFRSLSQNTATQGLLRGAMALAPP | |
| | PRGLWQAKDISPIVKAARRDGELLLSAQLDSEERDPGVPRPS | |
| | PYAPYILVYANDLAISEPNSVAVTLQRYDPFPAGDPEPRAAP | |
| | NNSADPRVRRAAQATGPLQDNELPGLDERPPRAHAQHFHKH | |
| | QLWPSPFRALKPRPGRKDRRKKGQEVFMAASQVLDFDEKT | |
| | MQKARRKQWDEPRVCSRRYLKVDFADIGWNEWIISPKSFDA | |
| | YYCAGACEFPMPKIVRPSNHATIQSIVRAVGIIPGIPEPCCVPD | |
| | KMNSLGVLFLDENRNVVLKVYPNMSVDTCACR | |
| GDNF | FPLPAGKRPPEAPAEDRSLGRRRAPFALSSDSNMPEDYPDQF | 34 |
| | DDVMDFIQATIKRLKRSPDKQMAVLPRRERNRQAAAANPE | |
| | NSRGKGRRGQRGKNRGCVLTAIHLNVTDLGLGYETKEELIFR | |
| | YCSGSCDAAETTYDKILKNLSRNRRLVSDKVGQACCRPIAFD | |
| | DDLSFLDDNLVYHILRKHSAKRCGCI | |
| NRTN | IWMCREGLLLSHRLGPALVPLHRLPRTLDARIARLAQYRALL | 35 |
| | QGAPDAMELRELTPWAGRPPGPRRRAGPRRRRARARLGAR | |
| | PCGLRELEVRVSELGLGYASDETVLFRYCAGACEAAARVYD | |
| | LGLRRLRQRRRLRRERVRAQPCCRPTAYEDEVSFLDAHSRY | |
| | HTVHELSARECACV | |
| PSPN | WGPDARGVPVADGEFSSEQVAKAGGTWLGTHRPLARLRRA | 36 |
| | LSGPCQLWSLTLSVAELGLGYASEEKVIFRYCAGSCPRGART | |
| | QHGLALARLQGQGRAHGGPCCRPTRYTDVAFLDDRHRWQR | |
| | LPQLSAAACGCGG | |
| ARTN | SLGSAPRSPAPREGPPPVLASPAGHLPGGRTARWCSGRARRP | 37 |
| | PPQPSRPAPPPPAPPSALPRGGRAARAGGPGSRARAAGARGC | |
| | RLRSQLVPVRALGLGHRSDELVRFRFCSGSCRRARSPHDLSL | |
| | ASLLGAGALRPPPGSRPVSQPCCRPTRYEAVSFMDVNSTWRT | |
| | VDRLSATACGCLG | |

[0041] It is noted that some prodomains may be cleaved by proprotein convertase enzymes. As used herein, the term “proprotein convertase” refers to an enzyme that cleaves a prodomain from a translated protein to facilitate protein maturation. Some proprotein convertases of the present invention include the subtilisin-like proprotein convertase (SPC) family member enzymes. The SPC family comprises calcium-dependent serine endoproteases that include, but are not limited to furin/PACE, PC1/3, PC2, PC4, PC5/6, PACE4 and PC7 (Fuller et al., 2009. Invest Ophthalmol Vis Sci. 50(12):5759-68, the contents of which are herein incorporated by reference in their entirety). GDF-11 may in some cases, be cleaved by PC5/6. In some cases, proprotein convertases may cleave proproteins at additional sites, other than those indicated in Table 1. In some embodiments, pro-proteins may be cleaved at a first cleavage site (the first site being the site closest to the N-terminus). In other embodiments, pro-proteins may be cleaved at a cleavage site other than a first cleavage site. In some cases, proprotein convertase cleavage may occur intracellularly. In some cases, proprotein convertase cleavage may occur extracellularly.

[0042] Many TGF-β family member proteins are synthesized in conjunction with prodomains. Some prodomains may remain associated with growth factors after cleavage. Such associations may form latent growth factor-prodomain complexes (GPCs) that modulate the availability of growth factors for cell signaling. Growth factors may be released from latency in GPCs through associations with one or more extracellular proteins. In some cases, growth factor release may rely on force applied to GPCs through extracellular protein interactions. Such forces may pull from C-terminal and/or N-terminal regions of GPCs resulting in the release of associated growth factors.

[0043] In some TGF-β family members, the prodomain portion of the GPC is responsible for growth factor retention and blocking the interaction of retained growth factors with their receptors. Prodomain portions of GPCs that function in this regard are referred to as latency associated peptides (LAPs). TGF-β1, 2 and 3 are know to comprise LAPs. Some prodomains may comprise LAP-like domains. As used herein, the term “LAP-like domain” refers to prodomain portions of GPCs and/or free prodomains that may be structurally similar or synthesized in a similar manner to LAPs, but that may not function to prevent growth factor/receptor interactions. GDF-8 and GDF-11 prodomains comprise LAP-like domains.

[0044] Depending on a variety of factors, growth factors may be free or associated with one or more LAP or LAP-like domains. FIG. 3 is a schematic depicting an embodiment wherein a growth factor dimer may associate with a LAP dimer. In some embodiments, GPCs comprise protein modules necessary for different aspects of growth factor signaling, secretion, latency and/or release from latent GPCs. As used herein, the term “protein module” refers to any component, region and/or feature of a protein. Protein modules may vary in length, comprising one or more amino acids. Protein modules may be from about 2 amino acid residues in length to about 50 amino acid residues in length, from about 5 amino acid residues in length to about 75 amino acid residues in length, from about 10 amino acid residues in length to about 100 amino acid residues in length, from about 25 amino acid residues in length to about 150 amino acid residues in length, from about 125 amino acid residues in length to about 250 amino acid residues in length, from about 175 amino acid residues in length to about 400 amino acid residues in length, from about 200 amino acid residues in length to about 500 amino acid residues in length and/or at least 500 amino acid residues in length.

[0045] In some embodiments, protein modules comprise one or more regions with known functional features (e.g. protein binding domain, nucleic acid binding domain, hydrophobic pocket, etc.). Protein modules may comprise functional protein domains necessary for different aspects of growth factor signaling, secretion, latency and/or release from latent conformations.

[0046] In some embodiments, protein modules may be derived from TGF-β-related proteins. Such protein modules may include, but are not limited to latency-associated peptides (LAPs), LAP-like domains, growth factor domains, fastener regions, proprotein convertase cleavage sites (e.g. furin cleavage sites), B/TP cleavage sites, arm regions, finger regions, residues (such as cysteine residues for example) for extracellular protein [e.g. latent TGF-β binding protein (LTBP), fibrillin and/or glycoprotein A repetitions predominant (GARP) protein] associations, latency loops (also referred to herein as latency lassos), alpha 1 helical regions, alpha 2 helical regions, RGD sequences and bowtie regions. FIG. 4 is a schematic diagram of an embodiment depicting LAP and growth factor dimers comprising protein modules.

[0047] In some embodiments, protein modules may be derived from one or more TGF-β isoform (e.g. TGF-β1, TGF-β2 and/or TGF-β3). Such protein modules may comprise the protein modules and/or amino acid sequences listed in Table 2. Some protein modules of the present invention may comprise amino acid sequences similar to those in Table 2, but comprise additional or fewer amino acids than those listed. Such amino acid sequences may comprise about 1 more or fewer amino acids, about 2 more or fewer amino acids, about 3 more or fewer amino acids, about 4 more or fewer amino acids, about 5 more or fewer amino acids, about 6 more or fewer amino acids, about 7 more or fewer amino acids, about 8 more or fewer amino acids, about 9 more or fewer amino acids, about 10 more or fewer amino acids or greater than 10 more or fewer amino acids on N-terminal and/or C-terminal ends.

TABLE 2
TGF-β protein modules

| TGF-β | | | SEQ |
|---|---|---|---|
| Family | | | ID |
| Member | Protein Module | Prodomain and growth factor Sequence | NO |
| TGF-β1 | latency associated | LSTCKTIDMELVKRKRIEAIRGQILSKLRLASPP | 38 |
| | peptide | SQGEVPPGPLPEAVLALYNSTRDRVAGESAEP | |
| | | EPEPEADYYAKEVTRVLMVETHNEIYDKFKQS | |
| | | THSIYMFFNTSELREAVPEPVLLSRAELRLLRL | |
| | | KLKVEQHVELYQKYSNNSWRYLSNRLLAPSD | |
| | | SPEWLSFDVTGVVRQWLSRGGEIEGFRLSAHC | |
| | | SCDSRDNTLQVDINGFTTGRRGDLATIHGMNR | |
| | | PFLLLMATPLERAQHLQSSRHRR | |
| TGF-β2 | latency associated | SLSTCSTLDMDQFMRKRIEAIRGQILSKLKLTSP | 39 |
| | peptide | PEDYPEPEEVPPEVISIYNSTRDLLQEKASRRAA | |
| | | ACERERSDEEYYAKEVYKIDMPPFFPSENAIPP | |
| | | TFYRPYFRIVRFDVSAMEKNASNLVKAEFRVF | |
| | | RLQNPKARVPEQRIELYQILKSKDLTSPTQRYI | |
| | | DSKVVKTRAEGEWLSFDVTDAVHEWLHHKD | |
| | | RNLGFKISLHCPCCTFVPSNNYIIPNKSEELEAR | |
| | | FAGIDGTSTYTSGDQKTIKSTRKKNSGKTPHLL | |
| | | LMLLPSYRLESQQTNRRKKR | |
| TGF-β3 | latency associated | SLSLSTCTTLDFGHIKKKRVEAIRGQILSKLRLT | 40 |
| | peptide | SPPEPTVMTHVPYQVLALYNSTRELLEEMHGE | |
| | | REEGCTQENTESEYYAKEIHKFDMIQGLAEHN | |
| | | ELAVCPKGITSKVFRFNVSSVEKNRTNLFRAEF | |
| | | RVLRVPNPSSKRNEQRIELFQILRPDEHIAKQR | |
| | | YIGGKNLPTRGTAEWLSFDVTDTVREWLLRRE | |
| | | SNLGLEISIHCPCHTFQPNGDILENIHEVMEIKF | |
| | | KGVDNEDDHGRGDLGRLKKQKDHHNPHLILM | |
| | | MIPPHRLDNPGQGGQRKKR | |
| TGF-β1 | straight jacket | LSTCKTIDMELVKRKRIEAIRGQILSKLRLASPP | 41 |
| | region | SQGEVPPGPLP | |
| TGF-β2 | straight jacket | SLSTCSTLDMDQFMRKRIEAIRGQILSKLKLTSP | 42 |
| | region | PEDYPEPEEVP | |
| TGF-β3 | straight jacket | SLSLSTCTTLDFGHIKKKRVEAIRGQILSKLRLT | 43 |
| | region | SPPEPTVMTHVP | |
| TGF-β1 | growth factor | ALDTNYCFSSTEKNCCVRQLYIDFRKDLGWK | 44 |
| | domain | WIHEPKGYHANFCLGPCPYIWSLDTQYSKVLA | |
| | | LYNQHNPGASAAPCCVPQALEPLPIVYYVGRK | |
| | | PKVEQLSNMIVRSCKCS | |
| TGF-β2 | growth factor | ALDAAYCFRNVQDNCCLRPLYIDFKRDLGWK | 45 |
| | domain | WIHEPKGYNANFCAGACPYLWSSDTQHSRVL | |
| | | SLYNTINPEASASPCCVSQDLEPLTILYYIGKTP | |
| | | KIEQLSNMIVKSCKCS | |
| TGF-β3 | growth factor | ALDTNYCFRNLEENCCVRPLYIDFRQDLGWK | 46 |
| | domain | WVHEPKGYYANFCSGPCPYLRSADTTHSTVLG | |
| | | LYNTLNPEASASPCCVPQDLEPLTILYYVGRTP | |
| | | KVEQLSNMVVKSCKCS | |
| TGF-β1 | fastener region | residues 74-76, YYA | — |
| TGF-β2 | fastener region | residues 79-81, YYA | — |
| TGF-β3 | fastener region | residues 80-82, YYA | — |
| TGF-β1 | furin cleavage site | RHRR | 47 |
| | region | | |
| TGF-β2 and | furin cleavage site | RKKR | 48 |
| TGF-β3 | region | | |
| TGF-β1 | arm region | EAVLALYNSTRDRVAGESAEPEPEPEADYYAK | 49 |
| | | EVTRVLMVETHNEIYDKFKQSTHSIYMFFNTSE | |
| | | LREAVPEPVLLSRAELRLLRLKLKVEQHVELY | |
| | | QKYSNNSWRYLSNRLLAPSDSPEWLSFDVTGV | |
| | | VRQWLSRGGEIEGFRLSAHCSCDSRDNTLQVD | |
| | | INGFTTGRRGDLATIHGMNRPFLLLMATPLER | |
| | | AQHLQSSRHRR | |
| TGF-β2 | arm region | PEVISIYNSTRDLLQEKASRRAAACERERSDEE | 50 |
| | | YYAKEVYKIDMPPFFPSENAIPPTFYRPYFRIVR | |
| | | FDVSAMEKNASNLVKAEFRVFRLQNPKARVP | |
| | | EQRIELYQILKSKDLTSPTQRYIDSKVVKTRAE | |
| | | GEWLSFDVTDAVHEWLHHKDRNLGFKISLHC | |
| | | PCCTFVPSNNYIIPNKSEELEARFAGIDGTSTYT | |
| | | SGDQKTIKSTRKKNSGKTPHLLLMLLPSYRLES | |
| | | QQTNRRKKR | |
| TGF-β3 | arm region | YQVLALYNSTRELLEEMHGEREEGCTQENTES | 51 |
| | | EYYAKEIHKFDMIQGLAEHNELAVCPKGITSK | |
| | | VFRFNVSSVEKNRTNLFRAEFRVLRVPNPSSKR | |
| | | NEQRIELFQILRPDEHIAKQRYIGGKNLPTRGT | |
| | | AEWLSFDVTDTVREWLLRRESNLGLEISIHCPC | |
| | | HTFQPNGDILENIHEVMEIKFKGVDNEDDHGR | |
| | | GDLGRLKKQKDHHNPHLILMMIPPHRLDNPGQ | |
| | | GGQRKKR | |
| TGF-β3 | arm region 2 | ELLEEMHGEREEGCTQENTESEYYAKEIHKFD | 52 |
| | | MIQGLAEHNELAVCPKGITSKVFRFNVSSVEK | |
| | | NRTNLFRAEFRVLRVPNPSSKRNEQRIELFQILR | |
| | | PDEHIAKQRYIGGKNLPTRGTAEWLSFDVTDT | |
| | | VREWLLRRESNLGLEISIHCPCHTFQPNGDILE | |
| | | NIHEVMEIKFKGVDNEDDHGRGDLGRLKKQK | |
| | | DHHNPHLILMMIPPHRLDNPGQGGQRKKR | |
| TGF-β1 | fingers region 1 | CVRQLYIDFRKDLGWKWIHEPKGYHANFC | 53 |
| TGF-β2 | fingers region 1 | CLRPLYIDFKRDLGWKWIHEPKGYNANFCA | 54 |
| TGF-β3 | fingers region 1 | CVRPLYIDFRQDLGWKWVHEPKGYYANFCS | 55 |
| TGF-β1 | fingers region 2 | CVPQALEPLPIVYYVGRKPKVEQLSNMIVRSC | 56 |
| | | KCS | |
| TGF-β2 | fingers region 2 | CVSQDLEPLTILYYIGKTPKIEQLSNMIVKSCKCS | 57 |
| TGF-β3 | fingers region 2 | CVPQDLEPLTILYYVGRTPKVEQLSNMVVKSC | 58 |
| | | KCS | |
| TGF-β1 | residue for LTBP | Cys 4 | — |
| | association | | |
| TGF-β2 | residue for LTBP | Cys 5 | — |
| | association | | |
| TGF-β3 | residue for LTBP | Cys 7 | — |
| | association | | |
| TGF-β1 | residue for GARP | Cys 4 | — |
| | association | | |
| TGF-β2 | residue for GARP | Cys 5 | — |
| | association | | |
| TGF-β3 | residue for GARP | Cys 7 | — |
| | association | | |
| TGF-β1 | latency loop | LASPPSQGEVPPGPL | 59 |
| TGF-β2 | latency loop | LTSPPEDYPEPEE | 60 |
| TGF-β3 | latency loop | LTSPPEPTVMTHV | 61 |
| TGF-β1 | alpha 1 helical | LSTCKTIDMELVKRKRIEAIRGQILSKLR | 62 |
| | region | | |
| TGF-β2 | alpha 1 helical | LSTCSTLDMDQFMRKRIEAIRGQILSKLK | 63 |
| | region | | |
| TGF-β3 | alpha 1 helical | LSLSTCTTLDFGHIKKKRVEAIRGQILSKLR | 64 |
| | region | | |
| TGF-β1 | trigger loop region | NGFTTGRRGDLATIHGMNRP | 65 |
| TGF-β2 | trigger loop region | FAGIDGTSTYTSGDQKTIKSTRKKNSGKTP | 66 |
| | (long) | | |
| TGF-β3 | trigger loop region | GVDNEDDHGRGDLGRLKKQKDHHNP | 67 |
| TGF-β1 | RGD sequence | residue 215-217, RGD | — |
| | region | | |
| TGF-β3 | RGD sequence | residue 241-243, RGD | — |
| | region | | |
| TGF-β1 | bowtie region | CSCDSRDNTLQVD | 68 |
| TGF-β2 | bowtie region | CPCCTFVPSNNYIIPNKSEELEAR | 69 |
| TGF-β3 | bowtie region | CPCHTFQPNGDILENIHEVMEIK | 70 |

[0048] In some embodiments, LAPs or LAP-like domains comprise the prodomain portion of a TGF-β-related protein and/or GPC. Some LAPs or LAP-like domains may associate with growth factors in GPCs. Some LAPs may sterically prevent growth factor association with one or more cellular receptors. LAPs or LAP-like domains may comprise arm regions and/or straight jacket regions. Some LAP or LAP-like domains may comprise C-terminal regions referred to herein as “bowtie regions.” In some LAP or LAP-like domain dimers, bowtie regions of each monomer may associate and/or interact. Such associations may comprise disulfide bond formation, as is found between monomers of TGF-β isoform LAPs.

[0049] In some embodiments, arm regions may comprise trigger loop regions. Trigger loops may comprise regions that associate with integrins. Such regions may comprise amino acid sequences comprising RGD (Arg-Gly-Asp). Regions comprising RGD sequences are referred to herein as RGD sequence regions. In some embodiments, LAPs or LAP-like domains comprise latency loops (also referred to herein as latency lassos). Some latency loops may maintain associations between LAPs or LAP-like domains and growth factors present within GPCs. LAPs or LAP-like domains may also comprise fastener regions. Such fastener regions may maintain associations between LAPs or LAP-like domains and growth factors present within GPCs. Some fastener regions may maintain LAP or LAP-like domain conformations that promote growth factor retention.

[0050] In some cases, GPCs may require enzymatic cleavage for dissociation of bound growth factors. Such cleavage may be carried out in some instances by members of the BMP-1/Tolloid-like proteinase (B/TP) family (Muir et al., 2011. J Biol Chem. 286(49):41905-11, the contents of which are herein incorporated by reference in their entirety). These metaloproteinases may include, but are not limited to BMP-1, mammalian tolloid protein (mTLD), mammalian tolloid-like 1 (mTLL1) and mammalian tolloid-like 2 (mTLL2). Exemplary GPCs that may be cleaved by such metalloproteinases may include, but are not limited to GDF-8 and GDF-11. In some cases, GDF-8 may be cleaved by mTLL2. In some cases, tolloid cleavage may occur intracellularly. In some cases, tolloid cleavage may occur extracellularly. Growth factor release from GPCs may require cleavage by furin followed by cleavage by one or more members of the BMP-1/Tolloid-like proteinase (B/TP) family. In one example, GDF-8 and/or GDF-11 GPCs may be transformed by furin cleavage into a latent form that further requires cleavage by mTLL2 for growth factor release.

[0051] Straight jacket regions may comprise alpha 1 helical regions. In some embodiments, alpha 1 helical regions may be positioned between growth factor monomers. Some alpha 1 helical regions comprise N-terminal regions of LAPs or LAP-like domains. Alpha 1 helical regions may also comprise N-terminal regions for extracellular associations. Such extracellular associations may comprise extracellular matrix proteins and/or proteins associated with the extracellular matrix. Some extracellular associations may comprise associations with proteins that may include, but are not limited to LTBPs (e.g. LTBP1, LTBP2, LTBP3 and/or LTBP4), fibrillins (e.g. fibrillin-1, fibrillin-2, fibrillin-3 and/or fibrillin-4), perlecan, decorin and/or GARPs (e.g. GARP and/or LRRC33). N-terminal extracellular associations may comprise disulfide bonds between cysteine residues. In some cases, extracellular matrix proteins and/or proteins associated with the extraceullar matrix may comprise bonds with one or more regions of LAPs/LAP-like domains other than N-terminal regions.

[0052] In some embodiments, growth factor domains comprise one or more growth factor monomers. Some growth factor domains comprise growth factor dimers. Such growth factor domains may comprise growth factor homodimers or heterodimers (comprising growth factor monomers from different TGF-β-related proteins). Some growth factor domains may comprise fingers regions. Such fingers regions may comprise β-pleated sheets. Fingers regions may associate with LAPs or LAP-like domains. Some fingers regions may maintain association between growth factor domains and LAPs or LAP-like domains.

[0053] In some embodiments, recombinant proteins of the present invention may comprise protein modules from growth differentiation factor (GDF) proteins. Such GDF protein modules may comprise the protein modules and/or amino acid sequences listed in Table 3. In some embodiments, protein modules of the present invention may comprise amino acid sequences similar to those in Table 3, but comprise additional or fewer amino acids than those listed. Some such amino acid sequences may comprise about 1 more or fewer amino acids, about 2 more or fewer amino acids, about 3 more or fewer amino acids, about 4 more or fewer amino acids, about 5 more or fewer amino acids, about 6 more or fewer amino acids, about 7 more or fewer amino acids, about 8 more or fewer amino acids, about 9 more or fewer amino acids, about 10 more or fewer amino acids or greater than 10 more or fewer amino acids on N-terminal and/or C-terminal ends.

TABLE 3
GDF protein modules

| TGF-β | | | SEQ |
|---|---|---|---|
| Family | | | ID |
| Member | Protein Module | Prodomain and growth factor Sequence | NO |
| GDF-8 | prodomain | NENSEQKENVEKEGLCNACTWRQNTKSSRIEA | 71 |
| | | IKIQILSKLRLETAPNISKDVIRQLLPKAPPLREL | |
| | | IDQYDVQRDDSSDGSLEDDDYHATTETIITMPT | |
| | | ESDFLMQVDGKPKCCFFKFSSKIQYNKVVKAQ | |
| | | LWIYLRPVETPTTVFVQILRLIKPMKDGTRYTG | |
| | | IRSLKLDMNPGTGIWQSIDVKTVLQNWLKQPE | |
| | | SNLGIEIKALDENGHDLAVTFPGPGEDGLNPFL | |
| | | EVKVTDTPKRSRR | |
| GDF-11 | prodomain | AEGPAAAAAAAAAAAAAGVGGERSSRPAPSV | 72 |
| | | APEPDGCPVCVWRQHSRELRLESIKSQILSKLR | |
| | | LKEAPNISREVVKQLLPKAPPLQQILDLHDFQG | |
| | | DALQPEDFLEEDEYHATTETVISMAQETDPAV | |
| | | QTDGSPLCCHFHFSPKVMFTKVLKAQLWVYL | |
| | | RPVPRPATVYLQILRLKPLTGEGTAGGGGGGR | |
| | | RHIRIRSLKIELHSRSGHWQSIDFKQVLHSWFR | |
| | | QPQSNWGIEINAFDPSGTDLAVTSLGPGAEGLH | |
| | | PFMELRVLENTKRSRR | |
| GDF-8 | straight jacket | NENSEQKENVEKEGLCNACTWRQNTKSSRIEA | 73 |
| | region | IKIQILSKLRLETAPNISKDVIRQLLPKAPPL | |
| GDF-11 | straight jacket | AEGPAAAAAAAAAAAAAGVGGERSSRPAPSV | 74 |
| | region | APEPDGCPVCVWRQHSRELRLESIKSQILSKLR | |
| | | LKEAPNISREVVKQLLPKAPPL | |
| GDF-8 | growth factor | DFGLDCDEHSTESRCCRYPLTVDFEAFGWDWI | 75 |
| | domain | IAPKRYKANYCSGECEFVFLQKYPHTHLVHQA | |
| | | NPRGSAGPCCTPTKMSPINMLYFNGKEQIIYGK | |
| | | IPAMVVDRCGCS | |
| GDF-11 | growth factor | NLGLDCDEHSSESRCCRYPLTVDFEAFGWDWI | 76 |
| | domain | IAPKRYKANYCSGQCEYMFMQKYPHTHLVQQ | |
| | | ANPRGSAGPCCTPTKMSPINMLYFNDKQQIIYG | |
| | | KIPGMVVDRCGCS | |
| GDF-8 | fastener region | residues 87-89, DYH | — |
| GDF-11 | fastener region | residues 110-112, EYH | — |
| GDF-8 | furin cleavage site | RSRR | 77 |
| and GDF- | region | | |
| 11 | | | |
| GDF-8 | BMP/Tolloid | between residues R75 and D76 | — |
| | cleavage site | | |
| GDF-11 | BMP/Tolloid | between residues G97 and D98 | — |
| | cleavage site | | |
| GDF-8 | arm region | RELIDQYDVQRDDSSDGSLEDDDYHATTETIIT | 78 |
| | | MPTESDFLMQVDGKPKCCFFKFSSKIQYNKVV | |
| | | KAQLWIYLRPVETPTTVFVQILRLIKPMKDGTR | |
| | | YTGIRSLKLDMNPGTGIWQSIDVKTVLQNWLK | |
| | | QPESNLGIEIKALDENGHDLAVTFPGPGEDGLN | |
| | | PFLEVKVTDTPKRSRR | |
| GDF-11 | arm region | QQILDLHDFQGDALQPEDFLEEDEYHATTETVI | 79 |
| | | SMAQETDPAVQTDGSPLCCHFHFSPKVMFTKV | |
| | | LKAQLWVYLRPVPRPATVYLQILRLKPLTGEG | |
| | | TAGGGGGGRRHIRIRSLKIELHSRSGHWQSIDF | |
| | | KQVLHSWFRQPQSNWGIEINAFDPSGTDLAVT | |
| | | SLGPGAEGLHPFMELRVLENTKRSRR | |
| GDF-8 | fingers region 1 | CRYPLTVDFEAFGWDWIIAPKRYKANYCS | 80 |
| and GDF- | | | |
| 11 | | | |
| GDF-8 | fingers region 2 | CTPTKMSPINMLYFNGKEQIIYGKIPAMVVDRC | 81 |
| | | GCS | |
| GDF-11 | fingers region 2 | CTPTKMSPINMLYFNDKQQIIYGKIPGMVVDR | 82 |
| | | CGCS | |
| GDF-8 | latency loop | RLETAPNISKDVIRQLLPKAPPL | 83 |
| GDF-11 | latency loop | RLKEAPNISREVVKQLLPKAPP | 84 |
| GDF-8 | alpha 1 helical | GLCNACTWRQNTKSSRIEAIKIQILSK | 85 |
| | region | | |
| GDF-11 | alpha 1 helical | DGCPVCVWRQHSRELRLESIKSQILSKL | 86 |
| | region | | |
| GDF-8 | bowtie region | DENGHDLAVTFPGP | 87 |
| GDF-11 | bowtie region | DPSGTDLAVTSLG | 88 |

[0054] Some recombinant proteins of the present invention may comprise GDF-15, GDF-15 signaling pathway-related proteins and/or modules and/or portions thereof. GDF-15 is a TGF-β family protein that is highly expressed in liver. Expression of GDF-15 is dramatically upregulated following liver injury (Hsiao et al. 2000. Mol Cell Biol. 20(10):3742-51). Additionally, its expression in macrophages may serve a protective function in the context of atherosclerosis, possibly through regulation of adhesion molecule expression (Preusch et al., 2013. Eur J Med Res. 18:19). While a member of the TGF-β family, GDF-15 comprises less than 30% homology with other members, making it the most divergent member of the family (Tanno et al., 2010. Curr Opin Hematol. 17(3):184-90, the contents of which are incorporated herein by reference in their entirety). The mature form is soluble and can be found in the blood stream. Interestingly, GDF-15 levels in circulation have been found to negatively correlate with hepcidin levels, suggesting a role for GDF-15 in iron load and/or metabolism (Finkenstedt et al., 2008. British Journal of Haematology. 144:789-93). Elevated GDF-15 in the blood is also associated with ineffective and/or apoptotic erythropoiesis, such as in subjects suffering from beta-thalassemia or dyserythropoietic anemias.

[0055] In some embodiments, recombinant proteins of the present invention may comprise protein modules from activin subunits. Such protein modules may comprise the protein modules and/or amino acid sequences of the activin subunit inhibin beta A, listed in Table 4. In some embodiments, protein modules of the present invention may comprise amino acid sequences similar to those in Table 4, but comprise additional or fewer amino acids than those listed. Some such amino acid sequences may comprise about 1 more or fewer amino acids, about 2 more or fewer amino acids, about 3 more or fewer amino acids, about 4 more or fewer amino acids, about 5 more or fewer amino acids, about 6 more or fewer amino acids, about 7 more or fewer amino acids, about 8 more or fewer amino acids, about 9 more or fewer amino acids, about 10 more or fewer amino acids or greater than 10 more or fewer amino acids on N-terminal and/or C-terminal ends.

TABLE 4
Inhibin beta A protein modules

| | | SEQ ID |
|---|---|---|
| Protein Module | Prodomain and growth factor Sequence | NO |
| latency associated | SPTPGSEGHSAAPDCPSCALAALPKDVPNSQPE | 89 |
| peptide (LAP) | MVEAVKKHILNMLHLKKRPDVTQPVPKAALL | |
| | NAIRKLHVGKVGENGYVEIEDDIGRRAEMNEL | |
| | MEQTSEIITFAESGTARKTLHFEISKEGSDLSVV | |
| | ERAEVWLFLKVPKANRTRTKVTIRLFQQQKHP | |
| | QGSLDTGEEAEEVGLKGERSELLLSEKVVDAR | |
| | KSTWHVFPVSSSIQRLLDQGKSSLDVRIACEQC | |
| | QESGASLVLLGKKKKKEEEGEGKKKGGGEGG | |
| | AGADEEKEQSHRPFLMLQARQSEDHPHRRRRR | |
| straight jacket | SPTPGSEGHSAAPDCPSCALAALPKDVPNSQPE | 90 |
| region | MVEAVKKHILNMLHLKKRPDVTQPVPKAALLN | |
| growth factor | RGLECDGKVNICCKKQFFVSFKDIGWNDWIIA | 91 |
| domain | PSGYHANYCEGECPSHIAGTSGSSLSFHSTVIN | |
| | HYRMRGHSPFANLKSCCVPTKLRPMSMLYYD | |
| | DGQNIIKKDIQNMIVEECGCS | |
| fastener region | residues 89-91, RRA | — |
| furin cleavage site | RRRR | 92 |
| region | | |
| arm region | LNAIRKLHVGKVGENGYVEIEDDIGRRAEMNE | 93 |
| | LMEQTSEIITFAESGTARKTLHFEISKEGSDLSV | |
| | VERAEVWLFLKVPKANRTRTKVTIRLFQQQKH | |
| | PQGSLDTGEEAEEVGLKGERSELLLSEKVVDA | |
| | RKSTWHVFPVSSSIQRLLDQGKSSLDVRIACEQ | |
| | CQESGASLVLLGKKKKKEEEGEGKKKGGGEG | |
| | GAGADEEKEQSHRPFLMLQARQSEDHPHRRR | |
| | RR | |
| fingers region 1 | KKQFFVSFKDIGWNDWIIAPSGYHANYC | 94 |
| fingers region 2 | CVPTKLRPMSMLYYDDGQNIIKKDIQNMIVEE | 95 |
| | CGCS | |
| latency loop | LKKRPDVTQPVPKAALL | 96 |
| alpha 1 helical | ALAALPKDVPNSQPEMVEAVKKHILNML | 97 |
| region | | |
| bowtie region | QESGASLVLLGKKKKKEEEGEGKKKGGGEGG | 98 |
| | AG | |

[0056] Growth factor domains among TGF-β family members are more highly conserved while prodomains comprise a much lower percent identity among family members (FIG. 9). Table 5 demonstrates this trend among TGF-β isoforms.

TABLE 5
Percent identity among TGF-β isoforms: LAP vs growth factor

| | TGF-β1 | TGF-β2 | TGF-β3 |
|---|---|---|---|
| TGF-β1 | — | 31.2% vs 71.2% | 31.9% vs 76.7% |
| TGF-β2 | 31.2% vs 71.2% | — | 44.4% vs 79.4% |
| TGF-β3 | 31.9% vs 76.7% | 44.4% vs 79.4% | — |

[0057] Prodomains may vary in length from about 50 to about 200, from about 100 to about 400 or from about 300 to about 500 amino acids residues. In some embodiments, prodomains range from about 169 to about 433 residues. Prodomains may be unrelated in sequence and/or low in homology. Some prodomains may have similar folds and/or three dimensional structures. Prodomains of TGF-β family members may comprise latency loops. Such loops may be proline-rich. Latency loop length may determine the ability of such loops to encircle growth factor finger regions.

[0058] In some embodiments, protein modules from some TGF-β family members comprise low sequence identity with protein modules from other TGF-β family members. Such low sequence identity may indicate specialized roles for such family members with distinct protein modules.

[0059] Association of GPCs with extracellular proteins may strengthen prodomain-growth factor interactions. In some embodiments, such extracellular proteins may include, but are not limited to LTBPs, fibrillins and/or GARP. In some cases, extracellular protein associations are required to keep growth factors latent in GPCs.

[0060] GARP expression has been shown to be required for surface expression of GPCs on the surface of cells of hematopoietic origin (Tran, D. Q. et al., GARP (LRRC32) is essential for the surface expression of latent TGF-β on platelets and activated FOXP3+ regulatory T cells. PNAS. 2009, Jun. 2. 106(32):13445-50). GARP may act as a tether to hold GPCs in place on the surface of these cells, including, but not limited to regulatory T-cells and/or platelets.

[0061] In some embodiments, recombinant proteins of the present invention may comprise bone morphogenetic proteins (BMPs), a family of TGF-β-related proteins. Protein modules comprising sequences from BMPs may comprise sequences from any of those BMP modules disclosed in FIG. 8. While related to other TGF-β family member proteins, BMPs generally signal through SMAD1, 5 and 8 proteins while TGF-β isoforms (e.g. TGF-β1, TGF-β2 and TGF-β3) signal through SMAD2 and SMAD3.

[0062] Some BMP receptors and/or co-receptors are also distinct from other TGF-β family member proteins. Among these is the repulsive guidance molecule (RGM) family of proteins. RGM proteins act as co-receptors for BMP signaling. There are three RGM family members, RGMA, RGMB and RGMC [also known as hemojuvelin (Hjv)]. Recombinant proteins of the present invention comprising one or more BMP protein module may be useful for the development of antibodies and/or assays to study, enhance and/or perturb BMP interactions with RGM proteins.

[0063] Another family of GDF/BMP interacting proteins is C-terminal cysteine knot-like (CTCK) domain-containing proteins. In some cases, CTCK domain-containing proteins may act antagonistically with regard to GDF/BMP signal transduction. CTCK domain-containing proteins include, but are not limited to Cerberus, Connective tissue growth factor (CTGF), DAN domain family member 5 (DAND5), Gremlin-1 (GREM1), Gremlin-2 (GREM2), Mucin-19 (MUC19), Mucin-2 (MUC2), Mucin-5AC (MUC5AC), Mucin-5B (MUC5B), Mucin-6 (MUC6), Neuroblastoma suppressor of tumorigenicity 1 (NBL1), Norrin (NDP), Otogelin (OTOG), Otogelin-like protein (OTOGL), Protein CYR61 (CYR61), Protein NOV homolog (NOV), Sclerostin (SOST), Sclerostin domain-containing protein 1 (SOSTDC1), SCO-spondin (SSPO), Slit homolog 1 protein (SLIT1), Slit homolog 2 protein (SLIT2), Slit homolog 3 protein (SLIT3), von Willebrand factor (VWF), WNT1-inducible-signaling pathway protein 1 (WISP1) and WNT1-inducible-signaling pathway protein 3 (WISP3).

### Recombinant Proteins

[0064] In some embodiments, the present invention provides recombinant proteins. As used herein, the term “recombinant protein” refers to a protein produced by an artificial gene and/or process (e.g. genetic engineering). Such recombinant proteins may comprise one or more protein modules from one or more TGF-β-related proteins. Some recombinant proteins disclosed herein may be useful as recombinant antigens. As used herein, the term “recombinant antigen” refers to a recombinant protein that may be used to immunize one or more hosts for the production of antibodies directed toward one or more epitopes present on such recombinant antigens. Some recombinant antigens may be cell-based antigens. As used herein, the term “cell-based antigen” refers to recombinant antigens that are expressed in cells for presentation of such antigens on the cell surface. Such cells may be used to immunize hosts for the production of antibodies directed to such cell-based antigens.

[0065] In some embodiments, recombinant proteins disclosed herein may be used as therapeutics. Recombinant proteins disclosed herein may modulate growth factor (e.g. growth factors comprising TGF-β-related proteins) levels and/or activity (e.g. signaling) upon administration and/or introduction to one or more subjects and/or niches.

[0066] In some embodiments, recombinant proteins disclosed herein may be used to assay growth factor (e.g. growth factors comprising TGF-β-related proteins) levels and/or activity (e.g. signaling). Some recombinant proteins disclosed herein may be used in the isolation of antibodies directed to TGF-β-related proteins. Recombinant proteins of the present invention may also be used as recombinant antigens in the development of stabilizing [reducing or preventing dissociation between two agents, (e.g. growth-factor release from GPCs, GPC release from one or more protein interactions)] and/or releasing [enhancing the dissociation between two agents (e.g. growth-factor release from GPCs, GPC release from one or more protein interactions)] antibodies. Recombinant proteins of the present invention may include TGF-β family member proteins as well as components and/or protein modules thereof. Some recombinant proteins of the present invention may comprise prodomains without associated growth factors, furin cleavage-deficient mutants, mutants deficient in extracellular protein associations and/or combinations thereof.

[0067] In some embodiments, recombinant proteins may comprise detectable labels. Detectable labels may be used to allow for detection and/or isolation of recombinant proteins. Some detectable labels may comprise biotin labels, polyhistidine tags and/or flag tags. Such tags may be used to isolate tagged proteins. Proteins produced may comprise additional amino acids encoding one or more 3C protease cleavage site. Such sites allow for cleavage at the 3C protease cleavage site upon treatment with 3C protease, including, but not limited to rhinovirus 3C protease. Such cleavage sites are introduced to allow for removal of detectable labels from recombinant proteins.

### Recombinant GPCs

[0068] FIG. 5 is a schematic depicting an embodiment of a recombinant GPC. Recombinant proteins according to FIG. 5 comprising TGF-3-family member proteins may comprise features including, but not limited to C-terminal regions of the mature growth factor, N-terminal regions of the prodomain and/or proprotein cleavage sites. The proprotein cleavage site of recombinant TGF-β GPCs may, for example, comprise the furin consensus sequence RXXR wherein R is arginine and X indicates amino acid residues that may vary among TGF-β family members. Furin cleavage site sequences (although not limited to cleavage by furin alone and may include cleavage by other proprotein convertase enzymes) for each TGF-β family member are indicated in Table 1. Recombinant GPCs according to the embodiment depicted in FIG. 5 may also comprise one or more cysteine residues within and/or near the N-terminal region of the prodomain. Such cysteine residues may be from about 1 to about 10 amino acids, from about 4 to about 15 amino acids, from about 5 to about 20 amino acids and/or from about 7 to about 50 amino acids from the N-terminus of the prodomain. Recombinant GPCs may also comprise detectable labels. Such detectable labels may be useful for detection and/or isolation of recombinant GPCs. Detectable labels may comprise 2 or more histidine (His) residues. Such detectable labels may also be referred to herein as polyhistidine tags. Polyhistidine tags may include hexa histidine tags (SEQ ID NO: 102) or HIS-TAG™ (EMD Biosciences, Darmstadt, Germany) comprising a chain of six histidine residues (SEQ ID NO: 102). Some polyhistidine tags may be present at the N-terminus of recombinant proteins disclosed herein. Some polyhistidine tags may be present at the C-terminus of recombinant proteins disclosed herein. Proteins produced may comprise additional amino acids encoding one or more 3C protease cleavage site. Such sites allow for cleavage at the 3C protease cleavage site upon treatment with 3C protease, including, but not limited to rhinovirus 3C protease. Some cleavage sites may be introduced to allow for removal of detectable labels from recombinant proteins.

[0069] In some embodiments of the present invention, recombinant GPCs may comprise mutations in one or more amino acids as compared to wild type sequences. In some cases, one or more regions of proteolytic processing may be mutated. Such regions may comprise proprotein convertase cleavage sites. Proprotein convertase (e.g. furin) cleavage site mutations prevent enzymatic cleavage at that site and/or prevent enzymatic cleavage of growth factors from their prodomains (see FIG. 6). Some proprotein convertase cleavage sites comprising RXXR sequences may be mutated to RXG (wherein X indicates a site where amino acid residues may be variable). Such mutations are herein abbreviated as “D2G” mutations and may be resistant to enzymatic cleavage. In some embodiments, furin cleavage sites comprising RXXR sequences are mutated to AXXA. Such AXXA sequences may also be resistant to enzymatic cleavage.

[0070] In some embodiments, regions of proteolytic processing by tolloid and/or tolloid-like proteins may be mutated to prevent such proteolytic processing. In some embodiments, tolloid processing regions on GDF-8 and/or GDF-11 may be mutated. In some embodiments, mutation of aspartic acid residues to alanine residues within tolloid processing regions prevents tolloid processing. Mutation of aspartic acid residue 76 (D76) of the GDF-8 (myostatin) proprotein has been shown to prevent proteolytic activation of latent GDF-8 (Wolfman, N. M. et al., PNAS. 2003, Oct. 6. 100(26):15842-6). In some embodiments, Asp 120 (D120, residue number counted from the translated protein, D98 from the proprotein of SEQ ID NO: 4) in GDF-11 may be mutated to prevent tolloid processing (Ge et al., 2005. Mol Cell Biol. 25(14):5846-58, the contents of which are herein incorporated by reference in their entirety).

[0071] In some embodiments, one or more amino acids may be mutated in order to form recombinant GPCs with reduced latency. Such mutations are referred to herein as “activating mutations.” These mutations may introduce one or more regions of steric clash between complex prodomains and growth factor domains. As used herein, the term “steric clash,” when referring to the interaction between two proteins or between two domains and/or epitopes within the same protein, refers to a repulsive interaction between such proteins, domains and/or epitopes due to overlapping position in three-dimensional space. Steric clash within GPCs may reduce the affinity between prodomains and growth factor domains, resulting in elevated ratios of free growth factor to latent growth factor. In some embodiments, one or more amino acids may be mutated in order to form recombinant GPCs with increased latency. Such mutations are referred to herein as “stabilizing mutations.” These mutations may increase the affinity between prodomains and growth factor domains, resulting in decreased ratios of free growth factor to latent growth factor.

[0072] In some embodiments, recombinant proteins of the present invention may comprise any of the sequences listed in Table 6 or fragments thereof. In some cases, these sequences are expressed in association with N- and/or C-terminal secretion signal sequences [e.g. human Ig kappa chains with amino acid sequence MDMRVPAQLLGLLLLWFSGVLG (SEQ ID NO: 99)], flag tag sequences [e.g. DYKDDDDK (SEQ ID NO: 100)], one or more 3C protease cleavage site [e.g. LEVLFQGP (SEQ ID NO: 101)], one or more biotinylation site and/or His-tag sequences [e.g. HHHHHH (SEQ ID NO: 102)].

TABLE 6
Recombinant proteins

| | | SEQ |
|---|---|---|
| | | ID |
| Protein | Sequence | NO |
| proTGF-β1 | LSTCKTIDMELVKRKRIEAIRGQILSKLRLASPPSQGEVPPGP | 1 |
| | LPEAVLALYNSTRDRVAGESAEPEPEPEADYYAKEVTRVL | |
| | MVETHNEIYDKFKQSTHSIYMFFNTSELREAVPEPVLLSRA | |
| | ELRLLRLKLKVEQHVELYQKYSNNSWRYLSNRLLAPSDSP | |
| | EWLSFDVTGVVRQWLSRGGEIEGFRLSAHCSCDSRDNTLQ | |
| | VDINGFTTGRRGDLATIHGMNRPFLLLMATPLERAQHLQSS | |
| | RHRRALDTNYCFSSTEKNCCVRQLYIDFRKDLGWKWIHEP | |
| | KGYHANFCLGPCPYIWSLDTQYSKVLALYNQHNPGASAAP | |
| | CCVPQALEPLPIVYYVGRKPKVEQLSNMIVRSCKCS | |
| proTGF-β1 C4S | LSTSKTIDMELVKRKRIEAIRGQILSKLRLASPPSQGEVPPGP | 103 |
| | LPEAVLALYNSTRDRVAGESAEPEPEPEADYYAKEVTRVL | |
| | MVETHNEIYDKFKQSTHSIYMFFNTSELREAVPEPVLLSRA | |
| | ELRLLRLKLKVEQHVELYQKYSNNSWRYLSNRLLAPSDSP | |
| | EWLSFDVTGVVRQWLSRGGEIEGFRLSAHCSCDSRDNTLQ | |
| | VDINGFTTGRRGDLATIHGMNRPFLLLMATPLERAQHLQSS | |
| | RHRRALDTNYCFSSTEKNCCVRQLYIDFRKDLGWKWIHEP | |
| | KGYHANFCLGPCPYIWSLDTQYSKVLALYNQHNPGASAAP | |
| | CCVPQALEPLPIVYYVGRKPKVEQLSNMIVRSCKCS | |
| TGF-β1 LAP C4S | LSTSKTIDMELVKRKRIEAIRGQILSKLRLASPPSQGEVPPGP | 104 |
| | LPEAVLALYNSTRDRVAGESAEPEPEPEADYYAKEVTRVL | |
| | MVETHNEIYDKFKQSTHSIYMFFNTSELREAVPEPVLLSRA | |
| | ELRLLRLKLKVEQHVELYQKYSNNSWRYLSNRLLAPSDSP | |
| | EWLSFDVTGVVRQWLSRGGEIEGFRLSAHCSCDSRDNTLQ | |
| | VDINGFTTGRRGDLATIHGMNRPFLLLMATPLERAQHLQSS | |
| | RHRR | |
| proTGF-β1 D2G | LSTCKTIDMELVKRKRIEAIRGQILSKLRLASPPSQGEVPPGP | 105 |
| | LPEAVLALYNSTRDRVAGESAEPEPEPEADYYAKEVTRVL | |
| | MVETHNEIYDKFKQSTHSIYMFFNTSELREAVPEPVLLSRA | |
| | ELRLLRLKLKVEQHVELYQKYSNNSWRYLSNRLLAPSDSP | |
| | EWLSFDVTGVVRQWLSRGGEIEGFRLSAHCSCDSRDNTLQ | |
| | VDINGFTTGRRGDLATIHGMNRPFLLLMATPLERAQHLQSS | |
| | RHGALDTNYCFSSTEKNCCVRQLYIDFRKDLGWKWIHEPK | |
| | GYHANFCLGPCPYIWSLDTQYSKVLALYNQHNPGASAAPC | |
| | CVPQALEPLPIVYYVGRKPKVEQLSNMIVRSCKCS | |
| proTGF-β1 C4S D2G | LSTSKTIDMELVKRKRIEAIRGQILSKLRLASPPSQGEVPPGP | 106 |
| | LPEAVLALYNSTRDRVAGESAEPEPEPEADYYAKEVTRVL | |
| | MVETHNEIYDKFKQSTHSIYMFFNTSELREAVPEPVLLSRA | |
| | ELRLLRLKLKVEQHVELYQKYSNNSWRYLSNRLLAPSDSP | |
| | EWLSFDVTGVVRQWLSRGGEIEGFRLSAHCSCDSRDNTLQ | |
| | VDINGFTTGRRGDLATIHGMNRPFLLLMATPLERAQHLQSS | |
| | RHGALDTNYCFSSTEKNCCVRQLYIDFRKDLGWKWIHEPK | |
| | GYHANFCLGPCPYIWSLDTQYSKVLALYNQHNPGASAAPC | |
| | CVPQALEPLPIVYYVGRKPKVEQLSNMIVRSCKCS | |
| TGF-β1 LAP | LSTCKTIDMELVKRKRIEAIRGQILSKLRLASPPSQGEVPPGP | 38 |
| | LPEAVLALYNSTRDRVAGESAEPEPEPEADYYAKEVTRVL | |
| | MVETHNEIYDKFKQSTHSIYMFFNTSELREAVPEPVLLSRA | |
| | ELRLLRLKLKVEQHVELYQKYSNNSWRYLSNRLLAPSDSP | |
| | EWLSFDVTGVVRQWLSRGGEIEGFRLSAHCSCDSRDNTLQ | |
| | VDINGFTTGRRGDLATIHGMNRPFLLLMATPLERAQHLQSS | |
| | RHRR | |
| proTGF-β2 | SLSTCSTLDMDQFMRKRIEAIRGQILSKLKLTSPPEDYPEPE | 2 |
| | EVPPEVISIYNSTRDLLQEKASRRAAACERERSDEEYYAKE | |
| | VYKIDMPPFFPSENAIPPTFYRPYFRIVRFDVSAMEKNASNL | |
| | VKAEFRVFRLQNPKARVPEQRIELYQILKSKDLTSPTQRYID | |
| | SKVVKTRAEGEWLSFDVTDAVHEWLHHKDRNLGFKISLH | |
| | CPCCTFVPSNNYIIPNKSEELEARFAGIDGTSTYTSGDQKTIK | |
| | STRKKNSGKTPHLLLMLLPSYRLESQQTNRRKKRALDAAY | |
| | CFRNVQDNCCLRPLYIDFKRDLGWKWIHEPKGYNANFCA | |
| | GACPYLWSSDTQHSRVLSLYNTINPEASASPCCVSQDLEPL | |
| | TILYYIGKTPKIEQLSNMIVKSCKCS | |
| proTGF-β2 C5S | SLSTSSTLDMDQFMRKRIEAIRGQILSKLKLTSPPEDYPEPEE | 107 |
| | VPPEVISIYNSTRDLLQEKASRRAAACERERSDEEYYAKEV | |
| | YKIDMPPFFPSENAIPPTFYRPYFRIVRFDVSAMEKNASNLV | |
| | KAEFRVFRLQNPKARVPEQRIELYQILKSKDLTSPTQRYIDS | |
| | KVVKTRAEGEWLSFDVTDAVHEWLHHKDRNLGFKISLHC | |
| | PCCTFVPSNNYIIPNKSEELEARFAGIDGTSTYTSGDQKTIKS | |
| | TRKKNSGKTPHLLLMLLPSYRLESQQTNRRKKRALDAAYC | |
| | FRNVQDNCCLRPLYIDFKRDLGWKWIHEPKGYNANFCAG | |
| | ACPYLWSSDTQHSRVLSLYNTINPEASASPCCVSQDLEPLTI | |
| | LYYIGKTPKIEQLSNMIVKSCKCS | |
| TGF-β2 LAP C5S | SLSTSSTLDMDQFMRKRIEAIRGQILSKLKLTSPPEDYPEPEE | 108 |
| | VPPEVISIYNSTRDLLQEKASRRAAACERERSDEEYYAKEV | |
| | YKIDMPPFFPSENAIPPTFYRPYFRIVRFDVSAMEKNASNLV | |
| | KAEFRVFRLQNPKARVPEQRIELYQILKSKDLTSPTQRYIDS | |
| | KVVKTRAEGEWLSFDVTDAVHEWLHHKDRNLGFKISLHC | |
| | PCCTFVPSNNYIIPNKSEELEARFAGIDGTSTYTSGDQKTIKS | |
| | TRKKNSGKTPHLLLMLLPSYRLESQQTNRRKKR | |
| proTGF-β2 C5S D2G | SLSTSSTLDMDQFMRKRIEAIRGQILSKLKLTSPPEDYPEPEE | 109 |
| | VPPEVISIYNSTRDLLQEKASRRAAACERERSDEEYYAKEV | |
| | YKIDMPPFFPSENAIPPTFYRPYFRIVRFDVSAMEKNASNLV | |
| | KAEFRVFRLQNPKARVPEQRIELYQILKSKDLTSPTQRYIDS | |
| | KVVKTRAEGEWLSFDVTDAVHEWLHHKDRNLGFKISLHC | |
| | PCCTFVPSNNYIIPNKSEELEARFAGIDGTSTYTSGDQKTIKS | |
| | TRKKNSGKTPHLLLMLLPSYRLESQQTNRRKGALDAAYCF | |
| | RNVQDNCCLRPLYIDFKRDLGWKWIHEPKGYNANFCAGA | |
| | CPYLWSSDTQHSRVLSLYNTINPEASASPCCVSQDLEPLTIL | |
| | YYIGKTPKIEQLSNMIVKSCKCS | |
| proTGF-β2 D2G | SLSTCSTLDMDQFMRKRIEAIRGQILSKLKLTSPPEDYPEPE | 110 |
| | EVPPEVISIYNSTRDLLQEKASRRAAACERERSDEEYYAKE | |
| | VYKIDMPPFFPSENAIPPTFYRPYFRIVRFDVSAMEKNASNL | |
| | VKAEFRVFRLQNPKARVPEQRIELYQILKSKDLTSPTQRYID | |
| | SKVVKTRAEGEWLSFDVTDAVHEWLHHKDRNLGFKISLH | |
| | CPCCTFVPSNNYIIPNKSEELEARFAGIDGTSTYTSGDQKTIK | |
| | STRKKNSGKTPHLLLMLLPSYRLESQQTNRRKGALDAAYC | |
| | FRNVQDNCCLRPLYIDFKRDLGWKWIHEPKGYNANFCAG | |
| | ACPYLWSSDTQHSRVLSLYNTINPEASASPCCVSQDLEPLTI | |
| | LYYIGKTPKIEQLSNMIVKSCKCS | |
| TGF-β2 LAP | SLSTCSTLDMDQFMRKRIEAIRGQILSKLKLTSPPEDYPEPE | 39 |
| | EVPPEVISIYNSTRDLLQEKASRRAAACERERSDEEYYAKE | |
| | VYKIDMPPFFPSENAIPPTFYRPYFRIVRFDVSAMEKNASNL | |
| | VKAEFRVFRLQNPKARVPEQRIELYQILKSKDLTSPTQRYID | |
| | SKVVKTRAEGEWLSFDVTDAVHEWLHHKDRNLGFKISLH | |
| | CPCCTFVPSNNYIIPNKSEELEARFAGIDGTSTYTSGDQKTIK | |
| | STRKKNSGKTPHLLLMLLPSYRLESQQTNRRKKR | |
| proTGF-β3 | SLSLSTCTTLDFGHIKKKRVEAIRGQILSKLRLTSPPEPTVMT | 3 |
| | HVPYQVLALYNSTRELLEEMHGEREEGCTQENTESEYYAK | |
| | EIHKFDMIQGLAEHNELAVCPKGITSKVFRFNVSSVEKNRT | |
| | NLFRAEFRVLRVPNPSSKRNEQRIELFQILRPDEHIAKQRYI | |
| | GGKNLPTRGTAEWLSFDVTDTVREWLLRRESNLGLEISIHC | |
| | PCHTFQPNGDILENIHEVMEIKFKGVDNEDDHGRGDLGRL | |
| | KKQKDHHNPHLILMMIPPHRLDNPGQGGQRKKRALDTNY | |
| | CFRNLEENCCVRPLYIDFRQDLGWKWVHEPKGYYANFCS | |
| | GPCPYLRSADTTHSTVLGLYNTLNPEASASPCCVPQDLEPL | |
| | TILYYVGRTPKVEQLSNMVVKSCKCS | |
| proTGF-β3 C7S | SLSLSTSTTLDFGHIKKKRVEAIRGQILSKLRLTSPPEPTVMT | 111 |
| | HVPYQVLALYNSTRELLEEMHGEREEGCTQENTESEYYAK | |
| | EIHKFDMIQGLAEHNELAVCPKGITSKVFRFNVSSVEKNRT | |
| | NLFRAEFRVLRVPNPSSKRNEQRIELFQILRPDEHIAKQRYI | |
| | GGKNLPTRGTAEWLSFDVTDTVREWLLRRESNLGLEISIHC | |
| | PCHTFQPNGDILENIHEVMEIKFKGVDNEDDHGRGDLGRL | |
| | KKQKDHHNPHLILMMIPPHRLDNPGQGGQRKKRALDTNY | |
| | CFRNLEENCCVRPLYIDFRQDLGWKWVHEPKGYYANFCS | |
| | GPCPYLRSADTTHSTVLGLYNTLNPEASASPCCVPQDLEPL | |
| | TILYYVGRTPKVEQLSNMVVKSCKCS | |
| TGF-β3 LAP C7S | SLSLSTSTTLDFGHIKKKRVEAIRGQILSKLRLTSPPEPTVMT | 112 |
| | HVPYQVLALYNSTRELLEEMHGEREEGCTQENTESEYYAK | |
| | EIHKFDMIQGLAEHNELAVCPKGITSKVFRFNVSSVEKNRT | |
| | NLFRAEFRVLRVPNPSSKRNEQRIELFQILRPDEHIAKQRYI | |
| | GGKNLPTRGTAEWLSFDVTDTVREWLLRRESNLGLEISIHC | |
| | PCHTFQPNGDILENIHEVMEIKFKGVDNEDDHGRGDLGRL | |
| | KKQKDHHNPHLILMMIPPHRLDNPGQGGQRKKR | |
| proTGF-β3 C7S D2G | SLSLSTSTTLDFGHIKKKRVEAIRGQILSKLRLTSPPEPTVMT | 113 |
| | HVPYQVLALYNSTRELLEEMHGEREEGCTQENTESEYYAK | |
| | EIHKFDMIQGLAEHNELAVCPKGITSKVFRFNVSSVEKNRT | |
| | NLFRAEFRVLRVPNPSSKRNEQRIELFQILRPDEHIAKQRYI | |
| | GGKNLPTRGTAEWLSFDVTDTVREWLLRRESNLGLEISIHC | |
| | PCHTFQPNGDILENIHEVMEIKFKGVDNEDDHGRGDLGRL | |
| | KKQKDHHNPHLILMMIPPHRLDNPGQGGQRKGALDTNYC | |
| | FRNLEENCCVRPLYIDFRQDLGWKWVHEPKGYYANFCSGP | |
| | CPYLRSADTTHSTVLGLYNTLNPEASASPCCVPQDLEPLTIL | |
| | YYVGRTPKVEQLSNMVVKSCKCS | |
| proTGF-β3 D2G | SLSLSTCTTLDFGHIKKKRVEAIRGQILSKLRLTSPPEPTVMT | 114 |
| | HVPYQVLALYNSTRELLEEMHGEREEGCTQENTESEYYAK | |
| | EIHKFDMIQGLAEHNELAVCPKGITSKVFRFNVSSVEKNRT | |
| | NLFRAEFRVLRVPNPSSKRNEQRIELFQILRPDEHIAKQRYI | |
| | GGKNLPTRGTAEWLSFDVTDTVREWLLRRESNLGLEISIHC | |
| | PCHTFQPNGDILENIHEVMEIKFKGVDNEDDHGRGDLGRL | |
| | KKQKDHHNPHLILMMIPPHRLDNPGQGGQRKGALDTNYC | |
| | FRNLEENCCVRPLYIDFRQDLGWKWVHEPKGYYANFCSGP | |
| | CPYLRSADTTHSTVLGLYNTLNPEASASPCCVPQDLEPLTIL | |
| | YYVGRTPKVEQLSNMVVKSCKCS | |
| TGF-β3 LAP | SLSLSTCTTLDFGHIKKKRVEAIRGQILSKLRLTSPPEPTVMT | 40 |
| | HVPYQVLALYNSTRELLEEMHGEREEGCTQENTESEYYAK | |
| | EIHKFDMIQGLAEHNELAVCPKGITSKVFRFNVSSVEKNRT | |
| | NLFRAEFRVLRVPNPSSKRNEQRIELFQILRPDEHIAKQRYI | |
| | GGKNLPTRGTAEWLSFDVTDTVREWLLRRESNLGLEISIHC | |
| | PCHTFQPNGDILENIHEVMEIKFKGVDNEDDHGRGDLGRL | |
| | KKQKDHHNPHLILMMIPPHRLDNPGQGGQRKKR | |

[0073] In some embodiments, activating mutations may comprise residues critical for LAP or LAP-like protein dimerization. Some activating mutations may comprise TGF-β isoforms (TGF-β1, TGF-β2 and/or TGF-β3). Mutant GPCs with activating mutations may comprise mutations that correspond to mutations identified in Camurati-Engelmann disease (CED). Subjects suffering from CED typically have genetic defects in TGF-β1. Mutations identified in such subjects include, but are not limited to mutations in residues Y81, R218, H222, C223 and C225. Residues C223 and C225 are necessary for disulfide bond formation in LAP dimerization. Mutations to R218, H222, C223 and/or C225 may lead to weakened or disrupted disulfide bond formation and LAP dimerization. In some embodiments, CED mutations lead to elevated release of TGF-β and/or increased TGF-β activity. In some embodiments, recombinant GPCs comprising TGF-β1 with CED mutations comprise sequences listed in Table 7. The amino acid substitutions indicated in these proteins reflect the residue number as counted from the start of the translated protein (before removal of the secretion signal sequence). In some cases, these sequences are expressed in association with N- and/or C-terminal secretion signal sequences [e.g. human Ig kappa chains with amino acid sequence MDMRVPAQLLGLLLLWFSGVLG (SEQ ID NO: 99)], flag tag sequences [e.g. DYKDDDDK (SEQ ID NO: 100)], one or more 3C protease cleavage site [e.g. LEVLFQGP (SEQ ID NO: 101)], one or more biotinylation site and/or His-tag sequences [e.g. HHHHHH (SEQ ID NO: 102)].

TABLE 7
Recombinant GPCs with Camurati-Engelmann mutations

| | | SEQ |
|---|---|---|
| | | ID |
| Protein | Sequence | NO |
| proTGF-β1 Y81H | LSTCKTIDMELVKRKRIEAIRGQILSKLRLASPPSQGEVPPGP | 115 |
| | LPEAVLALHNSTRDRVAGESAEPEPEPEADYYAKEVTRVL | |
| | MVETHNEIYDKFKQSTHSIYMFFNTSELREAVPEPVLLSRA | |
| | ELRLLRLKLKVEQHVELYQKYSNNSWRYLSNRLLAPSDSP | |
| | EWLSFDVTGVVRQWLSRGGEIEGFRLSAHCSCDSRDNTLQ | |
| | VDINGFTTGRRGDLATIHGMNRPFLLLMATPLERAQHLQSS | |
| | RHRRALDTNYCFSSTEKNCCVRQLYIDFRKDLGWKWIHEP | |
| | KGYHANFCLGPCPYIWSLDTQYSKVLALYNQHNPGASAAP | |
| | CCVPQALEPLPIVYYVGRKPKVEQLSNMIVRSCKCS | |
| proTGF-β1 R218C | LSTCKTIDMELVKRKRIEAIRGQILSKLRLASPPSQGEVPPGP | 116 |
| | LPEAVLALYNSTRDRVAGESAEPEPEPEADYYAKEVTRVL | |
| | MVETHNEIYDKFKQSTHSIYMFFNTSELREAVPEPVLLSRA | |
| | ELRLLRLKLKVEQHVELYQKYSNNSWRYLSNRLLAPSDSP | |
| | EWLSFDVTGVVRQWLSRGGEIEGFCLSAHCSCDSRDNTLQ | |
| | VDINGFTTGRRGDLATIHGMNRPFLLLMATPLERAQHLQSS | |
| | RHRRALDTNYCFSSTEKNCCVRQLYIDFRKDLGWKWIHEP | |
| | KGYHANFCLGPCPYIWSLDTQYSKVLALYNQHNPGASAAP | |
| | CCVPQALEPLPIVYYVGRKPKVEQLSNMIVRSCKCS | |
| proTGF-β1 H222D | LSTCKTIDMELVKRKRIEAIRGQILSKLRLASPPSQGEVPPGP | 117 |
| | LPEAVLALYNSTRDRVAGESAEPEPEPEADYYAKEVTRVL | |
| | MVETHNEIYDKFKQSTHSIYMFFNTSELREAVPEPVLLSRA | |
| | ELRLLRLKLKVEQHVELYQKYSNNSWRYLSNRLLAPSDSP | |
| | EWLSFDVTGVVRQWLSRGGEIEGFRLSADCSCDSRDNTLQ | |
| | VDINGFTTGRRGDLATIHGMNRPFLLLMATPLERAQHLQSS | |
| | RHRRALDTNYCFSSTEKNCCVRQLYIDFRKDLGWKWIHEP | |
| | KGYHANFCLGPCPYIWSLDTQYSKVLALYNQHNPGASAAP | |
| | CCVPQALEPLPIVYYVGRKPKVEQLSNMIVRSCKCS | |
| proTGF-β1 C223R | LSTCKTIDMELVKRKRIEAIRGQILSKLRLASPPSQGEVPPGP | 118 |
| | LPEAVLALYNSTRDRVAGESAEPEPEPEADYYAKEVTRVL | |
| | MVETHNEIYDKFKQSTHSIYMFFNTSELREAVPEPVLLSRA | |
| | ELRLLRLKLKVEQHVELYQKYSNNSWRYLSNRLLAPSDSP | |
| | EWLSFDVTGVVRQWLSRGGEIEGFRLSAHRSCDSRDNTLQ | |
| | VDINGFTTGRRGDLATIHGMNRPFLLLMATPLERAQHLQSS | |
| | RHRRALDTNYCFSSTEKNCCVRQLYIDFRKDLGWKWIHEP | |
| | KGYHANFCLGPCPYIWSLDTQYSKVLALYNQHNPGASAAP | |
| | CCVPQALEPLPIVYYVGRKPKVEQLSNMIVRSCKCS | |
| proTGF-β1 C225R | LSTCKTIDMELVKRKRIEAIRGQILSKLRLASPPSQGEVPPGP | 119 |
| | LPEAVLALYNSTRDRVAGESAEPEPEPEADYYAKEVTRVL | |
| | MVETHNEIYDKFKQSTHSIYMFFNTSELREAVPEPVLLSRA | |
| | ELRLLRLKLKVEQHVELYQKYSNNSWRYLSNRLLAPSDSP | |
| | EWLSFDVTGVVRQWLSRGGEIEGFRLSAHCSRDSRDNTLQ | |
| | VDINGFTTGRRGDLATIHGMNRPFLLLMATPLERAQHLQSS | |
| | RHRRALDTNYCFSSTEKNCCVRQLYIDFRKDLGWKWIHEP | |
| | KGYHANFCLGPCPYIWSLDTQYSKVLALYNQHNPGASAAP | |
| | CCVPQALEPLPIVYYVGRKPKVEQLSNMIVRSCKCS | |
| proTGF-β1 C223R | LSTCKTIDMELVKRKRIEAIRGQILSKLRLASPPSQGEVPPGP | 120 |
| C225R | LPEAVLALYNSTRDRVAGESAEPEPEPEADYYAKEVTRVL | |
| | MVETHNEIYDKFKQSTHSIYMFFNTSELREAVPEPVLLSRA | |
| | ELRLLRLKLKVEQHVELYQKYSNNSWRYLSNRLLAPSDSP | |
| | EWLSFDVTGVVRQWLSRGGEIEGFRLSAHRSRDSRDNTLQ | |
| | VDINGFTTGRRGDLATIHGMNRPFLLLMATPLERAQHLQSS | |
| | RHRRALDTNYCFSSTEKNCCVRQLYIDFRKDLGWKWIHEP | |
| | KGYHANFCLGPCPYIWSLDTQYSKVLALYNQHNPGASAAP | |
| | CCVPQALEPLPIVYYVGRKPKVEQLSNMIVRSCKCS | |

[0074] GPCs comprising CED mutations may find several uses in the context of the present invention. In some embodiments, such GPCs may be used to produce recombinant proteins comprising LAPs or LAP-like domains complexed with GARP. Coexpression of the entire GPC with GARP may be necessary in some embodiments, for proper association and folding. Through expression of GPCs comprising CED mutations, growth factors may be able to dissociate leaving the desired complexes of sGARP and LAP. Y81H mutations may be useful in this regard. Y81H mutations lead to growth factor release, but do not disrupt disulfide bonding between LAP monomers at residues C223 and C225. Therefore, complexes of sGARP and LAP formed through expression of Y81H GPC mutants may comprise intact LAP dimers wherein growth factors have become dissociated. In some embodiments, additional co-expression or addition of excess furin during the production process may enhance growth factor dissociation as well.

[0075] GPCs comprising CED mutations may be expressed to allow for the production and release of mature growth factor. Some GPC-free growth factors expressed according to this method may be used to assess antibody reactivity, for example in enzyme-linked immunosorbent assays (ELISAs). Some GPCs comprising CED mutations may be expressed to allow for the production and release of GPC-bound growth factors. GPCs comprising CED mutations may be expressed to allow for the production and release of chimeric proteins comprising the TGF-β1 LAP (or protein modules or fragments thereof) expressed with one or more protein modules from other TGF-β family members. Such chimeric proteins may comprise TGF-β1 LAP and TGF-β2 or TGF-β3 growth factor domains.

[0076] Furin cleavage of recombinant proteins of the invention may in some cases occur intracellularly. In some cases furin cleavage of recombinant proteins of the invention may occur extracellularly.

[0077] In some embodiments, recombinant GPCs of the present invention may comprise mutations in one or more N-terminal regions for extracellular associations. As used herein, the term “N-terminal region for extracellular association” refers to regions at or near protein N-termini that may be necessary for extracellular associations with one or more N-terminal regions. Such regions may comprise at least the first N-terminal residue, at least the first 5 N-terminal residues, at least the first 10 N-terminal residues, at least the first 20 amino acid residues and/or at least the first 50 amino acid residues. Some mutations may comprise from about 1 amino acid residue to about 30 amino acid residues, from about 5 amino acid residues to about 40 amino acid residues and/or from about 10 amino acid residues to about 50 amino acid residues at or near protein N-termini. Such regions may comprise residues for LTBP, fibrillin and/or GARP association. In some cases, one or more cysteine residues present within and/or near N-terminal regions for extracellular associations may be necessary for such associations. In some embodiments, cysteine residues present within and/or near N-terminal regions for extracellular associations are present within about the first 2 N-terminal residues, about the first 3 N-terminal residues, about the first 4 N-terminal residues, about the first 5 N-terminal residues, about the first 6 N-terminal residues, about the first 7 N-terminal residues and/or at least the first 30 N-terminal residues. Some mutations in one or more N-terminal regions for extracellular associations comprise substitution and/or deletion of such cysteine residues. Such mutations may modulate the association of GPCs and/or prodomains with one or more extracellular proteins, including, but not limited to LTBPs, fibrillins and/or GARP. These mutations may also comprise substitution of one or more cysteine with another amino acid. Cysteine residue substitutions are abbreviated herein as “C#X” wherein # represents the residue number [counting from the N-terminus of the pro-protein (without the signal peptide)] of the original cysteine residue and X represents the one letter amino acid code for the amino acid that is used for substitution. Any amino acid may be used for such substitutions. In some cases, serine (S) residues are used to substitute cysteine residues. Nonlimiting examples of such mutations may include C4S, C5S and/or C7S. In recombinant GPCs comprising N-terminal prodomain regions from TGF-β1, cysteine residues residing at amino acid position number 4 may be mutated. In recombinant GPCs comprising N-terminal prodomain regions from TGF-β2, cysteine residues residing at amino acid position number 5 may be mutated In recombinant GPCs comprising N-terminal prodomain regions from TGF-β3, cysteine residues at position 7 may be mutated.

[0078] In some cases, one or more cysteine in one or more other region of GPCs may be substituted or deleted. In some embodiments, such GPC modifications may promote the release of mature growth factor from prodomains. In some cases, such cysteines may include those present in one or more of mature growth factors, alpha 2 helices, fasteners, latency lassos and/or bow-tie regions.

[0079] In some embodiments, recombinant proteins of the present invention may comprise protein modules derived from one or more species, including mammals, including, but not limited to mice, rats, rabbits, pigs, monkeys and/or humans. Recombinant proteins may comprise one or more amino acids from one or more amino acid sequences derived from one or more non-human protein sequences listed in Table 8. In some cases, recombinant proteins of the present invention may comprise such sequences with or without the native signal peptide. GPCs comprising CED mutations may find several uses in the context of the present invention. In some embodiments, such GPCs may be used to produce recombinant proteins comprising LAPs or LAP-like domains complexed with GARP. Coexpression of the entire GPC with GARP may be necessary in some embodiments, for proper association and folding. Through expression of GPCs comprising CED mutations, growth factors may be able to dissociate leaving the desired complexes of sGARP and LAP. Y81H mutations may be useful in this regard. Y81H mutations lead to growth factor release, but do not disrupt disulfide bonding between LAP monomers at residues C223 and C225. Therefore, complexes of sGARP and LAP formed through expression of Y81H GPC mutants may comprise intact LAP dimers wherein growth factors have become dissociated. In some embodiments, additional co-expression or addition of excess furin during the production process may enhance growth factor dissociation as well. In some cases, these sequences are expressed in association with N- and/or C-terminal secretion signal sequences [e.g. human Ig kappa chains with amino acid sequence MDMRVPAQLLGLLLLWFSGVLG (SEQ ID NO: 99)], flag tag sequences [e.g. DYKDDDDK (SEQ ID NO: 100)], one or more 3C protease cleavage site [e.g. LEVLFQGP (SEQ ID NO: 101)], one or more biotinylation site and/or His-tag sequences [e.g. HHHHHH (SEQ ID NO: 102)].

TABLE 8
Non-human proteins

| | | | SEQ |
|---|---|---|---|
| | | | ID |
| Protein | Species | Sequence | NO |
| proTGF-β1 | Mouse | LSTCKTIDMELVKRKRIEAIRGQILSKLRLASPPSQGEVPP | 121 |
| | | GPLPEAVLALYNSTRDRVAGESADPEPEPEADYYAKEV | |
| | | TRVLMVDRNNAIYEKTKDISHSIYMFFNTSDIREAVPEPP | |
| | | LLSRAELRLQRLKSSVEQHVELYQKYSNNSWRYLGNRL | |
| | | LTPTDTPEWLSFDVTGVVRQWLNQGDGIQGFRFSAHCS | |
| | | CDSKDNKLHVEINGISPKRRGDLGTIHDMNRPFLLLMAT | |
| | | PLERAQHLHSSRHRRALDTNYCFSSTEKNCCVRQLYIDF | |
| | | RKDLGWKWIHEPKGYHANFCLGPCPYIWSLDTQYSKVL | |
| | | ALYNQHNPGASASPCCVPQALEPLPIVYYVGRKPKVEQ | |
| | | LSNMIVRSCKCS | |
| proTGF-β1 | Cyno | LSTCKTIDMELVKRKRIEAIRGQILSKLRLASPPSQGEVPP | 122 |
| | | GPLPEAVLALYNSTRDRVAGESAEPEPEPEADYYAKEVT | |
| | | RVLMVETHNEIYDKFKQSTHSIYMFFNTSELREAVPEPV | |
| | | LLSRAELRLLRLKLKVEQHVELYQKYSNNSWRYLSNRL | |
| | | LAPSDSPEWLSFDVTGVVRQWLSRGGEIEGFRLSAHCSC | |
| | | DSKDNTLQVDINGFTTGRRGDLATIHGMNRPFLLLMAT | |
| | | PLERAQHLQSSRHRRALDTNYCFSSTEKNCCVRQLYIDF | |
| | | RKDLGWKWIHEPKGYHANFCLGPCPYIWSLDTQYSKVL | |
| | | ALYNQHNPGASAAPCCVPQALEPLPIVYYVGRKPKVEQ | |
| | | LSNMIVRSCKCS | |
| TGF-β1 LAP | Mouse | LSTSKTIDMELVKRKRIEAIRGQILSKLRLASPPSQGEVPP | 123 |
| C4S | | GPLPEAVLALYNSTRDRVAGESADPEPEPEADYYAKEV | |
| | | TRVLMVDRNNAIYEKTKDISHSIYMFFNTSDIREAVPEPP | |
| | | LLSRAELRLQRLKSSVEQHVELYQKYSNNSWRYLGNRL | |
| | | LTPTDTPEWLSFDVTGVVRQWLNQGDGIQGFRFSAHCS | |
| | | CDSKDNKLHVEINGISPKRRGDLGTIHDMNRPFLLLMAT | |
| | | PLERAQHLHSSRHRR | |
| TGF-β1 LAP | Cyno | LSTSKTIDMELVKRKRIEAIRGQILSKLRLASPPSQGEVPP | 124 |
| C4S | | GPLPEAVLALYNSTRDRVAGESAEPEPEPEADYYAKEVT | |
| | | RVLMVETHNEIYDKFKQSTHSIYMFFNTSELREAVPEPV | |
| | | LLSRAELRLLRLKLKVEQHVELYQKYSNNSWRYLSNRL | |
| | | LAPSDSPEWLSFDVTGVVRQWLSRGGEIEGFRLSAHCSC | |
| | | DSKDNTLQVDINGFTTGRRGDLATIHGMNRPFLLLMAT | |
| | | PLERAQHLQSSRHRR | |
| proTGF-β1 | Mouse | LSTSKTIDMELVKRKRIEAIRGQILSKLRLASPPSQGEVPP | 125 |
| C4S D2G | | GPLPEAVLALYNSTRDRVAGESADPEPEPEADYYAKEV | |
| | | TRVLMVDRNNAIYEKTKDISHSIYMFFNTSDIREAVPEPP | |
| | | LLSRAELRLQRLKSSVEQHVELYQKYSNNSWRYLGNRL | |
| | | LTPTDTPEWLSFDVTGVVRQWLNQGDGIQGFRFSAHCS | |
| | | CDSKDNKLHVEINGISPKRRGDLGTIHDMNRPFLLLMAT | |
| | | PLERAQHLHSSRHGALDTNYCFSSTEKNCCVRQLYIDFR | |
| | | KDLGWKWIHEPKGYHANFCLGPCPYIWSLDTQYSKVLA | |
| | | LYNQHNPGASASPCCVPQALEPLPIVYYVGRKPKVEQLS | |
| | | NMIVRSCKCS | |
| proTGF-β1 | Mouse | LSTSKTIDMELVKRKRIEAIRGQILSKLRLASPPSQGEVPP | 126 |
| C4S | | GPLPEAVLALYNSTRDRVAGESADPEPEPEADYYAKEV | |
| | | TRVLMVDRNNAIYEKTKDISHSIYMFFNTSDIREAVPEPP | |
| | | LLSRAELRLQRLKSSVEQHVELYQKYSNNSWRYLGNRL | |
| | | LTPTDTPEWLSFDVTGVVRQWLNQGDGIQGFRFSAHCS | |
| | | CDSKDNKLHVEINGISPKRRGDLGTIHDMNRPFLLLMAT | |
| | | PLERAQHLHSSRHRRALDTNYCFSSTEKNCCVRQLYIDF | |
| | | RKDLGWKWIHEPKGYHANFCLGPCPYIWSLDTQYSKVL | |
| | | ALYNQHNPGASASPCCVPQALEPLPIVYYVGRKPKVEQ | |
| | | LSNMIVRSCKCS | |
| proTGF-β1 | Cyno | LSTSKTIDMELVKRKRIEAIRGQILSKLRLASPPSQGEVPP | 127 |
| C4S | | GPLPEAVLALYNSTRDRVAGESAEPEPEPEADYYAKEVT | |
| | | RVLMVETHNEIYDKFKQSTHSIYMFFNTSELREAVPEPV | |
| | | LLSRAELRLLRLKLKVEQHVELYQKYSNNSWRYLSNRL | |
| | | LAPSDSPEWLSFDVTGVVRQWLSRGGEIEGFRLSAHCSC | |
| | | DSKDNTLQVDINGFTTGRRGDLATIHGMNRPFLLLMAT | |
| | | PLERAQHLQSSRHRRALDTNYCFSSTEKNCCVRQLYIDF | |
| | | RKDLGWKWIHEPKGYHANFCLGPCPYIWSLDTQYSKVL | |
| | | ALYNQHNPGASAAPCCVPQALEPLPIVYYVGRKPKVEQ | |
| | | LSNMIVRSCKCS | |
| proTGF-β1 | Cyno | LSTSKTIDMELVKRKRIEAIRGQILSKLRLASPPSQGEVPP | 128 |
| C4S D2G | | GPLPEAVLALYNSTRDRVAGESAEPEPEPEADYYAKEVT | |
| | | RVLMVETHNEIYDKFKQSTHSIYMFFNTSELREAVPEPV | |
| | | LLSRAELRLLRLKLKVEQHVELYQKYSNNSWRYLSNRL | |
| | | LAPSDSPEWLSFDVTGVVRQWLSRGGEIEGFRLSAHCSC | |
| | | DSKDNTLQVDINGFTTGRRGDLATIHGMNRPFLLLMAT | |
| | | PLERAQHLQSSRHGALDTNYCFSSTEKNCCVRQLYIDFR | |
| | | KDLGWKWIHEPKGYHANFCLGPCPYIWSLDTQYSKVLA | |
| | | LYNQHNPGASAAPCCVPQALEPLPIVYYVGRKPKVEQL | |
| | | SNMIVRSCKCS | |
| LRRC32 | Cyno | AQHQDKVACKMVDKKVSCQGLGLLQVPLVLPPDTETL | 129 |
| | | DLSGNQLRSILASPLGFYTALRHLDLSTNEINFLQPGAFQ | |
| | | ALTHLEHLSLAHNRLAMATALSAGGLGPLPRVTSLDLS | |
| | | GNSLYSGLLERLLGEAPSLHTLSLAENSLTRLTRHTFRD | |
| | | MPALEQLDLHSNVLMDIEDGAFEGLPHLTHLNLSRNSLT | |
| | | CISDFSLQQLRVLDLSCNSIEAFQTASQPQAEFQLTWLDL | |
| | | RENKLLHFPDLAALPRLIYLNLSNNLIRLPTGPPQDSKGI | |
| | | HAPSEGWSALPLSTPNGNVSARPLSQLLNLDLSYNEIELI | |
| | | PDSFLEHLTSLCFLNLSRNCLRTFEARRSGSLPCLMLLDL | |
| | | SHNALETLELGARALGSLRTLLLQGNALRDLPPYTFANL | |
| | | ASLQRLNLQGNRVSPCGGPNEPGPASCVAFSGIASLRSLS | |
| | | LVDNEIELLRAGAFLHTPLTELDLSSNPGLEVATGALTGL | |
| | | EASLEVLALQGNGLTVLQVDLPCFICLKRLNLAENRLSH | |
| | | LPAWTQAVSLEVLDLRNNSFSLLPGSAMGGLETSLRRL | |
| | | YLQGNPLSCCGNGWLAAQLHQGRVDVDATQDLICRFSS | |
| | | QEEVSLSHVRPEDCEKGGLKNINLIIILTFILVSAILLTTLA | |
| | | TCCCVRRQKFNQQYKA | |
| proGDF-8 | Mouse | NEGSEREENVEKEGLCNACAWRQNTRYSRIEAIKIQILS | 130 |
| | | KLRLETAPNISKDAIRQLLPRAPPLRELIDQYDVQRDDSS | |
| | | DGSLEDDDYHATTETIITMPTESDFLMQADGKPKCCFFK | |
| | | FSSKIQYNKVVKAQLWIYLRPVKTPTTVFVQILRLIKPM | |
| | | KDGTRYTGIRSLKLDMSPGTGIWQSIDVKTVLQNWLKQ | |
| | | PESNLGIEIKALDENGHDLAVTFPGPGEDGLNPFLEVKV | |
| | | TDTPKRSRRDFGLDCDEHSTESRCCRYPLTVDFEAFGW | |
| | | DWIIAPKRYKANYCSGECEFVFLQKYPHTHLVHQANPR | |
| | | GSAGPCCTPTKMSPINMLYFNGKEQIIYGKIPAMVVDRC | |
| | | GCS | |
| proGDF-8 | Mouse | NEGSEREENVEKEGLCNACAWRQNTRYSRIEAIKIQILS | 131 |
| AxxA | | KLRLETAPNISKDAIRQLLPRAPPLRELIDQYDVQRDDSS | |
| | | DGSLEDDDYHATTETIITMPTESDFLMQADGKPKCCFFK | |
| | | FSSKIQYNKVVKAQLWIYLRPVKTPTTVFVQILRLIKPM | |
| | | KDGTRYTGIRSLKLDMSPGTGIWQSIDVKTVLQNWLKQ | |
| | | PESNLGIEIKALDENGHDLAVTFPGPGEDGLNPFLEVKV | |
| | | TDTPKASRADFGLDCDEHSTESRCCRYPLTVDFEAFGW | |
| | | DWIIAPKRYKANYCSGECEFVFLQKYPHTHLVHQANPR | |
| | | GSAGPCCTPTKMSPINMLYFNGKEQIIYGKIPAMVVDRC | |
| | | GCS | |
| proGDF-8 | Mouse | NEGSEREENVEKEGLCNACAWRQNTRYSRIEAIKIQILS | 132 |
| D76A | | KLRLETAPNISKDAIRQLLPRAPPLRELIDQYDVQRADSS | |
| | | DGSLEDDDYHATTETIITMPTESDFLMQADGKPKCCFFK | |
| | | FSSKIQYNKVVKAQLWIYLRPVKTPTTVFVQILRLIKPM | |
| | | KDGTRYTGIRSLKLDMSPGTGIWQSIDVKTVLQNWLKQ | |
| | | PESNLGIEIKALDENGHDLAVTFPGPGEDGLNPFLEVKV | |
| | | TDTPKRSRRDFGLDCDEHSTESRCCRYPLTVDFEAFGW | |
| | | DWIIAPKRYKANYCSGECEFVFLQKYPHTHLVHQANPR | |
| | | GSAGPCCTPTKMSPINMLYFNGKEQIIYGKIPAMVVDRC | |
| | | GCS | |
| proGDF-8 | Mouse | NEGSEREENVEKEGLCNACAWRQNTRYSRIEAIKIQILS | 133 |
| AxxA D76A | | KLRLETAPNISKDAIRQLLPRAPPLRELIDQYDVQRADSS | |
| | | DGSLEDDDYHATTETIITMPTESDFLMQADGKPKCCFFK | |
| | | FSSKIQYNKVVKAQLWIYLRPVKTPTTVFVQILRLIKPM | |
| | | KDGTRYTGIRSLKLDMSPGTGIWQSIDVKTVLQNWLKQ | |
| | | PESNLGIEIKALDENGHDLAVTFPGPGEDGLNPFLEVKV | |
| | | TDTPKASRADFGLDCDEHSTESRCCRYPLTVDFEAFGW | |
| | | DWIIAPKRYKANYCSGECEFVFLQKYPHTHLVHQANPR | |
| | | GSAGPCCTPTKMSPINMLYFNGKEQIIYGKIPAMVVDRC | |
| | | GCS | |
| GDF-8 | Mouse | NEGSEREENVEKEGLCNACAWRQNTRYSRIEAIKIQILS | 134 |
| prodomain | | KLRLETAPNISKDAIRQLLPRAPPLRELIDQYDVQRDDSS | |
| | | DGSLEDDDYHATTETIITMPTESDFLMQADGKPKCCFFK | |
| | | FSSKIQYNKVVKAQLWIYLRPVKTPTTVFVQILRLIKPM | |
| | | KDGTRYTGIRSLKLDMSPGTGIWQSIDVKTVLQNWLKQ | |
| | | PESNLGIEIKALDENGHDLAVTFPGPGEDGLNPFLEVKV | |
| | | TDTPKRSRR | |
| GDF-8 | Mouse | NEGSEREENVEKEGLCNACAWRQNTRYSRIEAIKIQILS | 135 |
| prodomain | | KLRLETAPNISKDAIRQLLPRAPPLRELIDQYDVQRADSS | |
| D76A | | DGSLEDDDYHATTETIITMPTESDFLMQADGKPKCCFFK | |
| | | FSSKIQYNKVVKAQLWIYLRPVKTPTTVFVQILRLIKPM | |
| | | KDGTRYTGIRSLKLDMSPGTGIWQSIDVKTVLQNWLKQ | |
| | | PESNLGIEIKALDENGHDLAVTFPGPGEDGLNPFLEVKV | |
| | | TDTPKRSRR | |
| proGDF-8 | Cyno | NENSEQKENVEKEGLCNACTWRQNTKSSRIEAIKIQILSK | 136 |
| | | LRLETAPNISKDAIRQLLPKAPPLRELIDQYDVQRDDSSD | |
| | | GSLEDDDYHATTETIITMPTESDFLMQVDGKPKCCFFKF | |
| | | SSKIQYNKVVKAQLWIYLRPVETPTTVFVQILRLIKPMK | |
| | | DGTRYTGIRSLKLDMNPGTGIWQSIDVKTVLQNWLKQP | |
| | | ESNLGIEIKALDENGHDLAVTFPGPGEDGLNPFLEVKVT | |
| | | DTPKRSRRDFGLDCDEHSTESRCCRYPLTVDFEAFGWD | |
| | | WIIAPKRYKANYCSGECEFVFLQKYPHTHLVHQANPRG | |
| | | SAGPCCTPTKMSPINMLYFNGKEQIIYGKIPAMVVDRCG | |
| | | CS | |
| proGDF-8 | Cyno | NENSEQKENVEKEGLCNACTWRQNTKSSRIEAIKIQILSK | 137 |
| AxxA | | LRLETAPNISKDAIRQLLPKAPPLRELIDQYDVQRDDSSD | |
| | | GSLEDDDYHATTETIITMPTESDFLMQVDGKPKCCFFKF | |
| | | SSKIQYNKVVKAQLWIYLRPVETPTTVFVQILRLIKPMK | |
| | | DGTRYTGIRSLKLDMNPGTGIWQSIDVKTVLQNWLKQP | |
| | | ESNLGIEIKALDENGHDLAVTFPGPGEDGLNPFLEVKVT | |
| | | DTPKASRADFGLDCDEHSTESRCCRYPLTVDFEAFGWD | |
| | | WIIAPKRYKANYCSGECEFVFLQKYPHTHLVHQANPRG | |
| | | SAGPCCTPTKMSPINMLYFNGKEQIIYGKIPAMVVDRCG | |
| | | CS | |
| proGDF-8 | Cyno | NENSEQKENVEKEGLCNACTWRQNTKSSRIEAIKIQILSK | 138 |
| D76A | | LRLETAPNISKDAIRQLLPKAPPLRELIDQYDVQRADSSD | |
| | | GSLEDDDYHATTETIITMPTESDFLMQVDGKPKCCFFKF | |
| | | SSKIQYNKVVKAQLWIYLRPVETPTTVFVQILRLIKPMK | |
| | | DGTRYTGIRSLKLDMNPGTGIWQSIDVKTVLQNWLKQP | |
| | | ESNLGIEIKALDENGHDLAVTFPGPGEDGLNPFLEVKVT | |
| | | DTPKRSRRDFGLDCDEHSTESRCCRYPLTVDFEAFGWD | |
| | | WIIAPKRYKANYCSGECEFVFLQKYPHTHLVHQANPRG | |
| | | SAGPCCTPTKMSPINMLYFNGKEQIIYGKIPAMVVDRCG | |
| | | CS | |
| proGDF-8 | Cyno | NENSEQKENVEKEGLCNACTWRQNTKSSRIEAIKIQILSK | 139 |
| AxxA D76A | | LRLETAPNISKDAIRQLLPKAPPLRELIDQYDVQRADSSD | |
| | | GSLEDDDYHATTETIITMPTESDFLMQVDGKPKCCFFKF | |
| | | SSKIQYNKVVKAQLWIYLRPVETPTTVFVQILRLIKPMK | |
| | | DGTRYTGIRSLKLDMNPGTGIWQSIDVKTVLQNWLKQP | |
| | | ESNLGIEIKALDENGHDLAVTFPGPGEDGLNPFLEVKVT | |
| | | DTPKASRADFGLDCDEHSTESRCCRYPLTVDFEAFGWD | |
| | | WIIAPKRYKANYCSGECEFVFLQKYPHTHLVHQANPRG | |
| | | SAGPCCTPTKMSPINMLYFNGKEQIIYGKIPAMVVDRCG | |
| | | CS | |
| GDF-8 | Cyno | NENSEQKENVEKEGLCNACTWRQNTKSSRIEAIKIQILSK | 140 |
| prodomain | | LRLETAPNISKDAIRQLLPKAPPLRELIDQYDVQRDDSSD | |
| | | GSLEDDDYHATTETIITMPTESDFLMQVDGKPKCCFFKF | |
| | | SSKIQYNKVVKAQLWIYLRPVETPTTVFVQILRLIKPMK | |
| | | DGTRYTGIRSLKLDMNPGTGIWQSIDVKTVLQNWLKQP | |
| | | ESNLGIEIKALDENGHDLAVTFPGPGEDGLNPFLEVKVT | |
| | | DTPKRSRR | |
| GDF-8 | Cyno | NENSEQKENVEKEGLCNACTWRQNTKSSRIEAIKIQILSK | 141 |
| prodomain | | LRLETAPNISKDAIRQLLPKAPPLRELIDQYDVQRADSSD | |
| D76A | | GSLEDDDYHATTETIITMPTESDFLMQVDGKPKCCFFKF | |
| | | SSKIQYNKVVKAQLWIYLRPVETPTTVFVQILRLIKPMK | |
| | | DGTRYTGIRSLKLDMNPGTGIWQSIDVKTVLQNWLKQP | |
| | | ESNLGIEIKALDENGHDLAVTFPGPGEDGLNPFLEVKVT | |
| | | DTPKRSRR | |
| proGDF-11 | Mouse | AEGPAAAAAAAAAAAGVGGERSSRPAPSAPPEPDGCPV | 142 |
| | | CVWRQHSRELRLESIKSQILSKLRLKEAPNISREVVKQLL | |
| | | PKAPPLQQILDLHDFQGDALQPEDFLEEDEYHATTETVIS | |
| | | MAQETDPAVQTDGSPLCCHFHFSPKVMFTKVLKAQLW | |
| | | VYLRPVPRPATVYLQILRLKPLTGEGTAGGGGGGRRHIR | |
| | | IRSLKIELHSRSGHWQSIDFKQVLHSWFRQPQSNWGIEIN | |
| | | AFDPSGTDLAVTSLGPGAEGLHPFMELRVLENTKRSRRN | |
| | | LGLDCDEHSSESRCCRYPLTVDFEAFGWDWIIAPKRYKA | |
| | | NYCSGQCEYMFMQKYPHTHLVQQANPRGSAGPCCTPT | |
| | | KMSPINMLYFNDKQQIIYGKIPGMVVDRCGCS | |
| proGDF-11 | Mouse | AEGPAAAAAAAAAAAGVGGERSSRPAPSAPPEPDGCPV | 143 |
| AxxA | | CVWRQHSRELRLESIKSQILSKLRLKEAPNISREVVKQLL | |
| | | PKAPPLQQILDLHDFQGDALQPEDFLEEDEYHATTETVIS | |
| | | MAQETDPAVQTDGSPLCCHFHFSPKVMFTKVLKAQLW | |
| | | VYLRPVPRPATVYLQILRLKPLTGEGTAGGGGGGRRHIR | |
| | | IRSLKIELHSRSGHWQSIDFKQVLHSWFRQPQSNWGIEIN | |
| | | AFDPSGTDLAVTSLGPGAEGLHPFMELRVLENTKASRA | |
| | | NLGLDCDEHSSESRCCRYPLTVDFEAFGWDWIIAPKRYK | |
| | | ANYCSGQCEYMFMQKYPHTHLVQQANPRGSAGPCCTP | |
| | | TKMSPINMLYFNDKQQIIYGKIPGMVVDRCGCS | |
| proGDF-11 | Mouse | AEGPAAAAAAAAAAAGVGGERSSRPAPSAPPEPDGCPV | 144 |
| AxxA D96A | | CVWRQHSRELRLESIKSQILSKLRLKEAPNISREVVKQLL | |
| | | PKAPPLQQILDLHDFQGAALQPEDFLEEDEYHATTETVIS | |
| | | MAQETDPAVQTDGSPLCCHFHFSPKVMFTKVLKAQLW | |
| | | VYLRPVPRPATVYLQILRLKPLTGEGTAGGGGGGRRHIR | |
| | | IRSLKIELHSRSGHWQSIDFKQVLHSWFRQPQSNWGIEIN | |
| | | AFDPSGTDLAVTSLGPGAEGLHPFMELRVLENTKASRA | |
| | | NLGLDCDEHSSESRCCRYPLTVDFEAFGWDWIIAPKRYK | |
| | | ANYCSGQCEYMFMQKYPHTHLVQQANPRGSAGPCCTP | |
| | | TKMSPINMLYFNDKQQIIYGKIPGMVVDRCGCS | |
| proGDF-11 | Mouse | AEGPAAAAAAAAAAAGVGGERSSRPAPSAPPEPDGCPV | 145 |
| D96A | | CVWRQHSRELRLESIKSQILSKLRLKEAPNISREVVKQLL | |
| | | PKAPPLQQILDLHDFQGDALQPEDFLEEDEYHATTETVIS | |
| | | MAQETDPAVQTDGSPLCCHFHFSPKVMFTKVLKAQLW | |
| | | VYLRPVPRPATVYLQILRLKPLTGEGTAGGGGGGRRHIR | |
| | | IRSLKIELHSRSGHWQSIDFKQVLHSWFRQPQSNWGIEIN | |
| | | AFDPSGTDLAVTSLGPGAEGLHPFMELRVLENTKRSRRN | |
| | | LGLDCDEHSSESRCCRYPLTVDFEAFGWDWIIAPKRYKA | |
| | | NYCSGQCEYMFMQKYPHTHLVQQANPRGSAGPCCTPT | |
| | | KMSPINMLYFNDKQQTTYGKIPGMVVDRCGCS | |
| GDF-11 | Mouse | AEGPAAAAAAAAAAAGVGGERSSRPAPSAPPEPDGCPV | 146 |
| prodomain | | CVWRQHSRELRLESIKSQILSKLRLKEAPNISREVVKQLL | |
| | | PKAPPLQQILDLHDFQGDALQPEDFLEEDEYHATTETVIS | |
| | | MAQETDPAVQTDGSPLCCHFHFSPKVMFTKVLKAQLW | |
| | | VYLRPVPRPATVYLQILRLKPLTGEGTAGGGGGGRRHIR | |
| | | IRSLKIELHSRSGHWQSIDFKQVLHSWFRQPQSNWGIEIN | |
| | | AFDPSGTDLAVTSLGPGAEGLHPFMELRVLENTKRSRR | |
| GDF-11 | Mouse | AEGPAAAAAAAAAAAGVGGERSSRPAPSAPPEPDGCPV | 147 |
| prodomain | | CVWRQHSRELRLESIKSQILSKLRLKEAPNISREVVKQLL | |
| D96A | | PKAPPLQQILDLHDFQGAALQPEDFLEEDEYHATTETVIS | |
| | | MAQETDPAVQTDGSPLCCHFHFSPKVMFTKVLKAQLW | |
| | | VYLRPVPRPATVYLQILRLKPLTGEGTAGGGGGGRRHIR | |
| | | IRSLKIELHSRSGHWQSIDFKQVLHSWFRQPQSNWGIEIN | |
| | | AFDPSGTDLAVTSLGPGAEGLHPFMELRVLENTKRSRR | |
| LTBP3 | CYNO | GPAGERGAGGGGALARERFKVVFAPVICKRTCLKGQCR | 148 |
| | | DSCQQGSNMTLIGENGHSTDTLTGSGFRVVVCPLPCMN | |
| | | GGQCSSRNQCLCPPDFTGRFCQVPAGGAGGGTGGSGPG | |
| | | LSRAGALSTGALPPLAPEGDSVASKHAIYAVQVIADPPG | |
| | | PGEGPPAQHAAFLVPLGPGQISAEVQAPPPVVNVRVHHP | |
| | | PEASVQVHRIESSNAEGAAPSQHLLPHPKPSHPRPPTQKP | |
| | | LGRCFQDTLPKQPCGSNPLPGLTKQEDCCGSIGTAWGQS | |
| | | KCHKCPQLQYTGVQKPGPVRGEVGADCPQGYKRLNST | |
| | | HCQDINECAMPGVCRHGDCLNNPGSYRCVCPPGHSLGP | |
| | | SRTQCIADKPEEKSLCFRLVSPEHQCQHPLTTRLTRQLCC | |
| | | CSVGKAWGARCQRCPADGTAAFKEICPAGKGYHILTSH | |
| | | QTLTIQGESDFSLFLHPDGPPKPQQLPESPSQAPPPEDTEE | |
| | | ERGVTTDSPVSEERSVQQSHPTATTSPARPYPELISRPSPP | |
| | | TMRWFLPDLPPSRSAVEIAPTQVTETDECRLNQNICGHG | |
| | | ECVPGPPDYSCHCNPGYRSHPQHRYCVDVNECEAEPCG | |
| | | PGRGICMNTGGSYNCHCNRGYRLHVGAGGRSCVDLNE | |
| | | CAKPHLCGDGGFCINFPGHYKCNCYPGYRLKASRPPVC | |
| | | EDIDECRDPSSCPDGKCENKPGSFKCIACQPGYRSQGGG | |
| | | ACRDVNECAEGSPCSPGWCENLPGSFRCTCAQGYAPAP | |
| | | DGRSCVDVDECEAGDVCDNGICTNTPGSFQCQCLSGYH | |
| | | LSRDRSHCEDIDECDFPAACIGGDCINTNGSYRCLCPQG | |
| | | HRLVGGRKCQDIDECTQDPGLCLPHGACKNLQGSYVCV | |
| | | CDEGFTPTQDQHGCEEVEQPHHKKECYLNFDDTVFCDS | |
| | | VLATNVTQQECCCSLGAGWGDHCEIYPCPVYSSAEFHS | |
| | | LCPDGKGYTQDNNIVNYGIPAHRDIDECMLFGAEICKEG | |
| | | KCVNTQPGYECYCKQGFYYDGNLLECVDVDECLDESN | |
| | | CRNGVCENTRGGYRCACTPPAEYSPAQRQCLSPEEMDV | |
| | | DECQDPAACRPGRCVNLPGSYRCECRPPWVPGPSGRDC | |
| | | QLPESPAERAPERRDVCWSQRGEDGMCAGPQAGPALTF | |
| | | DDCCCRQGRGWGAQCRPCPPRGAGSQCPTSQSESNSFW | |
| | | DTSPLLLGKPRRDEDSSEEDSDECRCVSGRCVPRPGGAV | |
| | | CECPGGFQLDASRARCVDIDECRELNQRGLLCKSERCV | |
| | | NTSGSFRCVCKAGFARSRPHGACVPQRRR | |
| LTBP3 | Mouse | GPAGERGTGGGGALARERFKVVFAPVICKRTCLKGQCR | 149 |
| | | DSCQQGSNMTLIGENGHSTDTLTGSAFRVVVCPLPCMN | |
| | | GGQCSSRNQCLCPPDFTGRFCQVPAAGTGAGTGSSGPG | |
| | | LARTGAMSTGPLPPLAPEGESVASKHAIYAVQVIADPPG | |
| | | PGEGPPAQHAAFLVPLGPGQISAEVQAPPPVVNVRVHHP | |
| | | PEASVQVHRIEGPNAEGPASSQHLLPHPKPPHPRPPTQKP | |
| | | LGRCFQDTLPKQPCGSNPLPGLTKQEDCCGSIGTAWGQS | |
| | | KCHKCPQLQYTGVQKPVPVRGEVGADCPQGYKRLNST | |
| | | HCQDINECAMPGNVCHGDCLNNPGSYRCVCPPGHSLGP | |
| | | LAAQCIADKPEEKSLCFRLVSTEHQCQHPLTTRLTRQLC | |
| | | CCSVGKAWGARCQRCPADGTAAFKEICPGKGYHILTSH | |
| | | QTLTIQGESDFSLFLHPDGPPKPQQLPESPSRAPPLEDTEE | |
| | | ERGVTMDPPVSEERSVQQSHPTTTTSPPRPYPELISRPSPP | |
| | | TFHRFLPDLPPSRSAVEIAPTQVTETDECRLNQNICGHGQ | |
| | | CVPGPSDYSCHCNAGYRSHPQHRYCVDVNECEAEPCGP | |
| | | GKGICMNTGGSYNCHCNRGYRLHVGAGGRSCVDLNEC | |
| | | AKPHLCGDGGFCINFPGHYKCNCYPGYRLKASRPPICED | |
| | | IDECRDPSTCPDGKCENKPGSFKCIACQPGYRSQGGGAC | |
| | | RDVNECSEGTPCSPGWCENLPGSYRCTCAQYEPAQDGL | |
| | | SCIDVDECEAGKVCQDGICTNTPGSFQCQCLSGYHLSRD | |
| | | RSRCEDIDECDFPAACIGGDCINTNGSYRCLCPLGHRLV | |
| | | GGRKCKKDIDECSQDPGLCLPHACENLQGSYVCVCDEG | |
| | | FTLTQDQHGCEEVEQPHHKKECYLNFDDTVFCDSVLAT | |
| | | NVTQQECCCSLGAGWGDHCEIYPCPVYSSAEFHSLVPD | |
| | | GKRLHSGQQHCELCIPAHRDIDECILFGAEICKEGKCVNT | |
| | | QPGYECYCKQGFYYDGNLLECVDVDECLDESNCRNGV | |
| | | CENTRGGYRCACTPPAEYSPAQAQCLIPERWSTPQRDV | |
| | | KCAGASEERTACVWGPWAGPALTFDDCCCRQPRLGTQ | |
| | | CRPCPPRGTGSQCPTSQSESNSFWDTSPLLLGKSPRDEDS | |
| | | SEEDSDECRCVSGRCVPRPGGAVCECPGGFQLDASRAR | |
| | | CVDIDECRELNQRGLLCKSERCVNTSGSFRCVCKAGFTR | |
| | | SRPHGPACLSAAADDAAIAHTSVIDHRGYFH | |
| LTBP1S | Cyno | NHTGRIKVVFTPSICKVTCTKGSCQNSCEKGNTTTLISEN | 150 |
| | | GHAADTLTATNFRVVLCHLPCMNGGQCSSRDKCQCPPN | |
| | | FTGKLCQIPVHGASVPKLYQHSQQPGKALGTHVIHSTHT | |
| | | LPLTVTSQQGVKVKFPPNIVNIHVKHPPEASVQIHQVSRI | |
| | | DGPTGQKTKEAQPGQSQVSYQGLPVQKTQTIHSTYSHQ | |
| | | QVIPHVYPVAAKTQLGRCFQETIGSQCGKALPGLSKQED | |
| | | CCGTVGTSWGFNKCQKCPKKPSYHGYNQMMECLPGYK | |
| | | RVNNTFCQDINECQLQGVCPNGECLNTMGSYRCTCKIG | |
| | | FGPDPTFSSCVPDPPVISEEKGPCYRLVSSGRQCMHPLSV | |
| | | HLTKQLCCCSVGKAWGPHCEKCPLPGTAAFKEICPGGM | |
| | | GYTVSGVHRRRPIHHHVGKGPVFVKPKNTQPVAKSTHP | |
| | | PPLPAKEEPVEALTFSREHGPGVAEPEVATAPPEKEIPSL | |
| | | DQEKTKLEPGQPQLSPGISTIHLHPQFPVVIEKTSPPVPVE | |
| | | VAPEASTSSASQVIAPTQVTEINECTVNPDICGAGHCINL | |
| | | PVRYTCICYEGYKFSEQQRKCVDIDECTQVQHLCSQGRC | |
| | | ENTEGSFLCICPAGFMASEEGTNCIDVDECLRPDVCGEG | |
| | | HCVNTVGAFRCEYCDSGYRMTQRGRCEDIDECLNPSTC | |
| | | PDEQCVNSPGSYQCVPCTEGFRGWNGQCLDVDECLEPN | |
| | | VCTNGDCSNLEGSYMCSCHKGYTRTPDHKHCKDIDECQ | |
| | | QGNLCVNGQCKNTEGSFRCTCGQGYQLSAAKDQCEDID | |
| | | ECQHHHLCAHGQCRNTEGSFQCVCDQGYRASGLGDHC | |
| | | EDINECLEDKSVCQRGDCINTAGSYDCTCPDGFQLDDN | |
| | | KTCQDINECEHPGLCGPQGECLNTEGSFHCVCQQGFSIS | |
| | | ADGRTCEDIDECVNNTVCDSHGFCDNTAGSFRCLCYQG | |
| | | FQAPQDGQGCVDVNECELLSGVCGEAFCENVEGSFLCV | |
| | | CADENQEYSPMTGQCRSRTSTDLDVEQPKEEKKECYYN | |
| | | LNDASLCDNVLAPNVTKQECCCTSGAGWGDNCEIFPCP | |
| | | VLGTAEFTEMCPKGKGFVPAGESSSEAGGENYKDADEC | |
| | | LLFGQEICKNGFCLNTRPGYECYCKQGTYYDPVKLQCF | |
| | | DMDECQDPSSCIDGQCVNTEGSYNCFCTHPMVLDASEK | |
| | | RCIRPAESNEQIEETDVYQDLCWEHLSDEYVCSRPLVGK | |
| | | QTTYTECCCLYGEAWGMQCALCPMKDSDDYAQLCNIP | |
| | | VTGRRQPYGRDALVDFSEQYAPEADPYFIQDRFLNSFEE | |
| | | LQAEECGILNGCENGRCVRVQEGYTCDCFDGYHLDTAK | |
| | | MTCVDVNECDELNNRMSLCKNAKCINTEGSYKCLCLPG | |
| | | YVPSDKPNYCTPLNTALNLEKDSDLE | |
| LTBP1S | mouse | NHTGRIKVVFTPSICKVTCTKGNCQNSCQKGNTTTLISE | 151 |
| | | NGHAADTLTATNFRVVICHLPCMNGGQCSSRDKCQCPP | |
| | | NFTGKLCQIPVLGASMPKLYQHAQQQGKALGSHVIHST | |
| | | HTLPLTMTSQQGVKVKFPPNIVNIHVKHPPEASVQIHQV | |
| | | SRIDSPGGQKVKEAQPGQSQVSYQGLPVQKTQTVHSTY | |
| | | SHQQLIPHVYPVAAKTQLGRCFQETIGSQCGKALPGLSK | |
| | | QEDCCGTVGTSWGFNKCQKCPKKQSYHGYTQMMECL | |
| | | QGYKRVNNTFCQDINECQLQGVCPNGECLNTMGSYRCS | |
| | | CKMGFGPDPTFSSCVPDPPVISEEKGPCYRLVSPGRHCM | |
| | | HPLSVHLTKQICCCSVGKAWGPHCEKCPLPGTAAFKEIC | |
| | | PGGMGYTVSGVHRRRPIHQHIGKEAVYVKPKNTQPVAK | |
| | | STHPPPLPAKEEPVEALTSSWEHGPRGAEPEVVTAPPEK | |
| | | EIPSLDQEKTRLEPGQPQLSPGVSTIHLHPQFPVVVEKTSP | |
| | | PVPVEVAPEASTSSASQVIAPTQVTEINECTVNPDICGAG | |
| | | HCINLPVRYTCICYEGYKFSEQLRKCVDIDECAQVRHLC | |
| | | SQGRCENTEGSFLCVCPAGFMASEEGTNCIDVDECLRPD | |
| | | MCRDGRCINTAGAFRCEYCDSGYRMSRRGYCEDIDECL | |
| | | KPSTCPEEQCVNTPGSYQCVPCTEGFRGWNGQCLDVDE | |
| | | CLQPKVCTNGSCTNLEGSYMCSCHRGYSPTPDHRHCQD | |
| | | IDECQQGNLCMNGQCRNTDGSFRCTCGQGYQLSAAKD | |
| | | QCEDIDECEHHHLCSHGQCRNTEGSFQCVCNQGYRASV | |
| | | LGDHCEDINECLEDSSVCQGGDCINTAGSYDCTCPDGFQ | |
| | | LNDNKGCQDINECAQPGLCGSHGECLNTQGSFHCVCEQ | |
| | | GFSISADGRTCEDIDECVNNTVCDSHGFCDNTAGSFRCL | |
| | | CYQGFQAPQDGQGCVDVNECELLSGVCGEAFCENVEGS | |
| | | FLCVCADENQEYSPMTGQCRSRVTEDSGVDRQPREEKK | |
| | | ECYYNLNDASLCDNVLAPNVTKQECCCTSGAGWGDNC | |
| | | EIFPCPVQGTAEFTEMCPRGKGLVPAGESSYDTGGENYK | |
| | | DADECLLFGEEICKNGYCLNTQPGYECYCKQGTYYDPV | |
| | | KLQCFDMDECQDPNSCIDGQCVNTEGSYNCFCTHPMVL | |
| | | DASEKRCVQPTESNEQIEETDVYQDLCWEHLSEEYVCSR | |
| | | PLVGKQTTYTECCCLYGEAWGMQCALCPMKDSDDYA | |
| | | QLCNIPVTGRRRPYGRDALVDFSEQYGPETDPYFIQDRF | |
| | | LNSFEELQAEECGILNGCENGRCVRVQEGYTCDCFDGY | |
| | | HLDMAKMTCVDVNECSELNNRMSLCKNAKCINTEGSY | |
| | | KCLCLPGYIPSDKPNYCTPLNSALNLDKESDLE | |
| GARP | mouse | ISQRREQVPCRTVNKEALCHGLGLLQVPSVLSLDIQALY | 152 |
| | | LSGNQLQSILVSPLGFYTALRHLDLSDNQISFLQAGVFQA | |
| | | LPYLEHLNLAHNRLATGMALNSGGLGRLPLLVSLDLSG | |
| | | NSLHGNLVERLLGETPRLRTLSLAENSLTRLARHTFWG | |
| | | MPAVEQLDLHSNVLMDIEDGAFEALPHLTHLNLSRNSL | |
| | | TCISDFSLQQLQVLDLSCNSIEAFQTAPEPQAQFQLAWL | |
| | | DLRENKLLHFPDLAVFPRLIYLNVSNNLIQLPAGLPRGSE | |
| | | DLHAPSEGWSASPLSNPSRNASTHPLSQLLNLDLSYNEIE | |
| | | LVPASFLEHLTSLRFLNLSRNCLRSFEARQVDSLPCLVLL | |
| | | DLSHNVLEALELGTKVLGSLQTLLLQDNALQELPPYTFA | |
| | | SLASLQRLNLQGNQVSPCGGPAEPGPPGCVDFSGIPTLH | |
| | | VLNMAGNSMGMLRAGSFLHTPLTELDLSTNPGLDVATG | |
| | | ALVGLEASLEVLELQGNGLTVLRVDLPCFLRLKRLNLAE | |
| | | NQLSHLPAWTRAVSLEVLDLRNNSFSLLPGNAMGGLET | |
| | | SLRRLYLQGNPLSCCGNGWLAAQLHQGRVDVDATQDL | |
| | | ICRFGSQEELSLSLVRPEDCEKGGLKNVNLILLLSFTLVS | |
| | | AIVLTTLATICFLRRQKLSQQYKA | |
| sGARP | mouse | ISQRREQVPCRTVNKEALCHGLGLLQVPSVLSLDIQALY | 153 |
| | | LSGNQLQSILVSPLGFYTALRHLDLSDNQISFLQAGVFQA | |
| | | LPYLEHLNLAHNRLATGMALNSGGLGRLPLLVSLDLSG | |
| | | NSLHGNLVERLLGETPRLRTLSLAENSLTRLARHTFWG | |
| | | MPAVEQLDLHSNVLMDIEDGAFEALPHLTHLNLSRNSL | |
| | | TCISDFSLQQLQVLDLSCNSIEAFQTAPEPQAQFQLAWL | |
| | | DLRENKLLHFPDLAVFPRLIYLNVSNNLIQLPAGLPRGSE | |
| | | DLHAPSEGWSASPLSNPSRNASTHPLSQLLNLDLSYNEIE | |
| | | LVPASFLEHLTSLRFLNLSRNCLRSFEARQVDSLPCLVLL | |
| | | DLSHNVLEALELGTKVLGSLQTLLLQDNALQELPPYTFA | |
| | | SLASLQRLNLQGNQVSPCGGPAEPGPPGCVDFSGIPTLH | |
| | | VLNMAGNSMGMLRAGSFLHTPLTELDLSTNPGLDVATG | |
| | | ALVGLEASLEVLELQGNGLTVLRVDLPCFLRLKRLNLAE | |
| | | NQLSHLPAWTRAVSLEVLDLRNNSFSLLPGNAMGGLET | |
| | | SLRRLYLQGNPLSCCGNGWLAAQLHQGRVDVDATQDL | |
| | | ICRFGSQEELSLSLVRPEDCEKGGLKNVN | |
| LRRC33 | mouse | WRSGPGTATAASQGGCKVVDGVADCRGLNLASVPSSLP | 154 |
| | | PHSRMLILDANPLKDLWNHSLQAYPRLENLSLHSCHLD | |
| | | RISHYAFREQGHLRNLVLADNRLSENYKESAAALHTLL | |
| | | GLRRLDLSGNSLTEDMAALMLQNLSSLEVVSLARNTLM | |
| | | RLDDSIFEGLEHLVELDLQRNYIFEIEGGAFDGLTELRRL | |
| | | NLAYNNLPCIVDFSLTQLRFLNVSYNILEWFLAAREEVA | |
| | | FELEILDLSHNQLLFFPLLPQCGKLHTLLLQDNNMGFYR | |
| | | ELYNTSSPQEMVAQFLLVDGNVTNITTVNLWEEFSSSDL | |
| | | SALRFLDMSQNQFRHLPDGFLKKTPSLSHLNLNQNCLK | |
| | | MLHIREHEPPGALTELDLSHNQLAELHLAPGLTGSLRNL | |
| | | RVFNLSSNQLLGVPTGLFDNASSITTIDMSHNQISLCPQM | |
| | | VPVDWEGPPSCVDFRNMGSLRSLSLDGCGLKALQDCPF | |
| | | QGTSLTHLDLSSNWGVLNGSISPLWAVAPTLQVLSLRD | |
| | | VGLGSGAAEMDFSAFGNLRALDLSGNSLTSFPKFKGSLA | |
| | | LRTLDLRRNSLTALPQRVVSEQPLRGLQTIYLSQNPYDC | |
| | | CGVEGWGALQQHFKTVADLSMVTCNLSSKIVRVVELPE | |
| | | GLPQGCKWEQVDTGLFYLVLILPSCLTLLVACTVVFLTF | |
| | | KKPLLQVIKSRCHWSSIY | |
| sLRRC33 | mouse | WRSGPGTATAASQGGCKVVDGVADCRGLNLASVPSSLP | 155 |
| | | PHSRMLILDANPLKDLWNHSLQAYPRLENLSLHSCHLD | |
| | | RISHYAFREQGHLRNLVLADNRLSENYKESAAALHTLL | |
| | | GLRRLDLSGNSLTEDMAALMLQNLSSLEVVSLARNTLM | |
| | | RLDDSIFEGLEHLVELDLQRNYIFEIEGGAFDGLTELRRL | |
| | | NLAYNNLPCIVDFSLTQLRFLNVSYNILEWFLAAREEVA | |
| | | FELEILDLSHNQLLFFPLLPQCGKLHTLLLQDNNMGFYR | |
| | | ELYNTSSPQEMVAQFLLVDGNVTNITTVNLWEEFSSSDL | |
| | | SALRFLDMSQNQFRHLPDGFLKKTPSLSHLNLNQNCLK | |
| | | MLHIREHEPPGALTELDLSHNQLAELHLAPGLTGSLRNL | |
| | | RVFNLSSNQLLGVPTGLFDNASSITTIDMSHNQISLCPQM | |
| | | VPVDWEGPPSCVDFRNMGSLRSLSLDGCGLKALQDCPF | |
| | | QGTSLTHLDLSSNWGVLNGSISPLWAVAPTLQVLSLRD | |
| | | VGLGSGAAEMDFSAFGNLRALDLSGNSLTSFPKFKGSLA | |
| | | LRTLDLRRNSLTALPQRVVSEQPLRGLQTIYLSQNPYDC | |
| | | CGVEGWGALQQHFKTVADLSMVTCNLSSKIVRVVELPE | |
| | | GLPQGCKWEQVDTGL | |
| LRRC33 | Cyno | WRDRSVTATAASQRGCKLVGGDTDCRGQSLASVPSSLP | 156 |
| | | PHARTLILDANPLKALWNHSLQPYPLLESLSLHSCHLERI | |
| | | GRGAFQEQGHLRSLVLGDNCLSENYKETAAALHTLPGL | |
| | | QTLDLSGNSLTEDMAALMLQNLSSLQSVSLARNTIMRL | |
| | | DDSVFEGLERLRELDLQRNYIFEIEGGAFDGLTELRHLNL | |
| | | AYNNLPCIVDFGLTQLRSLNVSYNVLEWFLAAGGEAAF | |
| | | ELETLDLSHNQLLFFPLLPQYSKLHTLLLRDNNMGFYRD | |
| | | LYNTSSPREMVAQFLLVDGNVTNITTVNLWEEFSSSDLA | |
| | | DLRFLDMSQNQFQYLPDGFLRKMPSLSHLNLNQNCLMT | |
| | | LHIREHEPPGALTELDLSHNQLSELHLTPGLASCLGSLRL | |
| | | FNLSSNQLLGVPPGLFANARNITTLDMSHNQISLCPLPAA | |
| | | SDRVGPPSCVDFRNMASLRSLSLEGCGLGALPDCPFQGT | |
| | | SLTSLDLSSNWGVLNGSLAPLRDVAPMLQVLSLRNMGL | |
| | | HSNFMALDFSGFGNLRDLDLSGNCLTTFPRFGGSLALET | |
| | | LDLRRNSLTALPQKAVSEQLSRGLRTIYLSQNPYDCCGV | |
| | | DGWGALQQGQTVADWATVTCNLSSKIIRLAELPGGVPR | |
| | | DCKWERLDLGLLYLVLILPSCLTLLVACTLIVLTFKKPLL | |
| | | QVIKSRCHWSSVY | |
| sLRRC33 | Cyno | WRDRSVTATAASQRGCKLVGGDTDCRGQSLASVPSSLP | 157 |
| | | PHARTLILDANPLKALWNHSLQPYPLLESLSLHSCHLERI | |
| | | GRGAFQEQGHLRSLVLGDNCLSENYKETAAALHTLPGL | |
| | | QTLDLSGNSLTEDMAALMLQNLSSLQSVSLARNTIMRL | |
| | | DDSVFEGLERLRELDLQRNYIFEIEGGAFDGLTELRHLNL | |
| | | AYNNLPCIVDFGLTQLRSLNVSYNVLEWFLAAGGEAAF | |
| | | ELETLDLSHNQLLFFPLLPQYSKLHTLLLRDNNMGFYRD | |
| | | LYNTSSPREMVAQFLLVDGNVTNITTVNLWEEFSSSDLA | |
| | | DLRFLDMSQNQFQYLPDGFLRKMPSLSHLNLNQNCLMT | |
| | | LHIREHEPPGALTELDLSHNQLSELHLTPGLASCLGSLRL | |
| | | FNLSSNQLLGVPPGLFANARNITTLDMSHNQISLCPLPAA | |
| | | SDRVGPPSCVDFRNMASLRSLSLEGCGLGALPDCPFQGT | |
| | | SLTSLDLSSNWGVLNGSLAPLRDVAPMLQVLSLRNMGL | |
| | | HSNFMALDFSGFGNLRDLDLSGNCLTTFPRFGGSLALET | |
| | | LDLRRNSLTALPQKAVSEQLSRGLRTIYLSQNPYDCCGV | |
| | | DGWGALQQGQTVADWATVTCNLSSKIIRLAELPGGVPR | |
| | | DCKWERLDLGL | |
| L1- | Mouse | EINECTVNPDICGAGHCINLPVRYTCICYEGYKFSEQLRK | 380 |
| E11TB3EE | | CVDIDECAQVRHLCSQGRCENTEGSFLCVCPAGFMASE | |
| | | EGTNCIDVDECLRPDMCRDGRCINTAGAFRCEYCDSGY | |
| | | RMSRRGYCEDIDECLKPSTCPEEQCVNTPGSYQCVPCTE | |
| | | GFRGWNGQCLDVDECLQPKVCTNGSCTNLEGSYMCSC | |
| | | HRGYSPTPDHRHCQDIDECQQGNLCMNGQCRNTDGSFR | |
| | | CTCGQGYQLSAAKDQCEDIDECEHHHLCSHGQCRNTEG | |
| | | SFQCVCNQGYRASVLGDHCEDINECLEDSSVCQGGDCI | |
| | | NTAGSYDCTCPDGFQLNDNKGCQDINECAQPGLCGSHG | |
| | | ECLNTQGSFHCVCEQGFSISADGRTCEDIDECVNNTVCD | |
| | | SHGFCDNTAGSFRCLCYQGFQAPQDGQGCVDVNECELL | |
| | | SGVCGEAFCENVEGSFLCVCADENQEYSPMTGQCRSRV | |
| | | TEDSGVDRQPREEKKECYYNLNDASLCDNVLAPNVTKQ | |
| | | ECCCTSGAGWGDNCEIFPCPVQGTAEFTEMCPRGKGLV | |
| | | PAGESSYDTGGENYKDADECLLFGEEICKNGYCLNTQP | |
| | | GYECYCKQGTYYDPVKLQCFDMDECQDPNSCIDGQCV | |
| | | NTEGSYNCFCTHPMVLDASEKRCV | |
| L1- | Cyno | EINECTVNPDICGAGHCINLPVRYTCICYEGYKFSEQQRK | 381 |
| E11TB3EE | | CVDIDECTQVQHLCSQGRCENTEGSFLCICPAGFMASEE | |
| | | GTNCIDVDECLRPDVCGEGHCVNTVGAFRCEYCDSGYR | |
| | | MTQRGRCEDIDECLNPSTCPDEQCVNSPGSYQCVPCTEG | |
| | | FRGWNGQCLDVDECLEPNVCTNGDCSNLEGSYMCSCH | |
| | | KGYTRTPDHKHCKDIDECQQGNLCVNGQCKNTEGSFRC | |
| | | TCGQGYQLSAAKDQCEDIDECQHHHLCAHGQCRNTEG | |
| | | SFQCVCDQGYRASGLGDHCEDINECLEDKSVCQRGDCI | |
| | | NTAGSYDCTCPDGFQLDDNKTCQDINECEHPGLCGPQG | |
| | | ECLNTEGSFHCVCQQGFSISADGRTCEDIDECVNNTVCD | |
| | | SHGFCDNTAGSFRCLCYQGFQAPQDGQGCVDVNECELL | |
| | | SGVCGEAFCENVEGSFLCVCADENQEYSPMTGQCRSRT | |
| | | STDLDVEQPKEEKKECYYNLNDASLCDNVLAPNVTKQE | |
| | | CCCTSGAGWGDNCEIFPCPVLGTAEFTEMCPKGKGFVP | |
| | | AGESSSEAGGENYKDADECLLFGQEICKNGFCLNTRPGY | |
| | | ECYCKQGTYYDPVKLQCFDMDECQDPSSCIDGQCVNTE | |
| | | GSYNCFCTHPMVLDASEKRCI | |

[0080] In some embodiments, recombinant proteins may be combined and/or complexed with one or more additional recombinant components. Such components may include extracellular proteins known to associate with GPCs including, but not limited to LTBPs, fibrillins, perlecan, GASP1/2 proteins, follistatin, follistatin-related gene (FLRG), decorin and/or GARP (including, but not limited to recombinant forms of such proteins). Some recombinant GPCs of the present invention must be co-expressed with one or more of such extracellular proteins for proper expression and/or folding.

[0081] In some embodiments, complexed LTBPs may include, but are not limited to LTBP1, LTBP2, LTBP3 and/or LTBP4 with or without detectable labels. Complexed LTBPs may comprise LTBP fragments and/or mutations. Some recombinant forms of LTBPs complexed with recombinant GPCs may comprise alternatively spliced variants of LTBPs. Some such variants of LTBP1 are shortened at the N-terminus, referred to herein as LTBP1S. Some recombinant proteins of the present invention may comprise LTBPs, fragments or mutants thereof comprising the amino acid sequences listed in the Table below. In some cases, these sequences are expressed in association with N- and/or C-terminal secretion signal sequences [e.g. human Ig kappa chains with amino acid sequence MDMRVPAQLLGLLLLWFSGVLG (SEQ ID NO: 99)], flag tag sequences [e.g. DYKDDDDK (SEQ ID NO: 100)], one or more 3C protease cleavage site [e.g. LEVLFQGP (SEQ ID NO: 101)], one or more biotinylation site and/or His-tag sequences [e.g. HHHHHH (SEQ ID NO: 102)].

TABLE 9
LTBP sequences

| | | SEQ |
|---|---|---|
| | | ID |
| Protein | Sequence | NO |
| LTBP1 1265-1443 | NECELLSGVCGEAFCENVEGSFLCVCADENQEYSPMTGQC | 158 |
| | RSRTSTDLDVDVDQPKEEKKECYYNLNDASLCDNVLAPNV | |
| | TKQECCCTSGVGWGDNCEIFPCPVLGTAEFTEMCPKGKGF | |
| | VPAGESSSEAGGENYKDADECLLFGQEICKNGFCLNTRPGY | |
| | ECYCKQGTYYDPVKLQCF | |
| LTBP1 1265-1698 | NECELLSGVCGEAFCENVEGSFLCVCADENQEYSPMTGQC | 159 |
| | RSRTSTDLDVDVDQPKEEKKECYYNLNDASLCDNVLAPNV | |
| | TKQECCCTSGVGWGDNCEIFPCPVLGTAEFTEMCPKGKGF | |
| | VPAGESSSEAGGENYKDADECLLFGQEICKNGFCLNTRPGY | |
| | ECYCKQGTYYDPVKLQCFDMDECQDPSSCIDGQCVNTEGS | |
| | YNCFCTHPMVLDASEKRCIRPAESNEQIEETDVYQDLCWE | |
| | HLSDEYVCSRPLVGKQTTYTECCCLYGEAWGMQCALCPL | |
| | KDSDDYAQLCNIPVTGRRQPYGRDALVDFSEQYTPEADPY | |
| | FIQDRFLNSFEELQAEECGILNGCENGRCVRVQEGYTCDCF | |
| | DGYHLDTAKMTCVDVNECDELNNRMSLCKNAKCINTDGS | |
| | YKCLCLPGYVPSDKPNYCTPLNTALNLEKDSDLE | |
| LTBP1 809-1698 | PSLDQEKTKLEPGQPQLSPGISTIHLHPQFPVVIEKTSPPVPV | 160 |
| | EVAPEASTSSASQVIAPTQVTEINECTVNPDICGAGHCINLP | |
| | VRYTCICYEGYRFSEQQRKCVDIDECTQVQHLCSQGRCEN | |
| | TEGSFLCICPAGFMASEEGTNCIDVDECLRPDVCGEGHCVN | |
| | TVGAFRCEYCDSGYRMTQRGRCEDIDECLNPSTCPDEQCV | |
| | NSPGSYQCVPCTEGFRGWNGQCLDVDECLEPNVCANGDC | |
| | SNLEGSYMCSCHKGYTRTPDHKHCRDIDECQQGNLCVNG | |
| | QCKNTEGSFRCTCGQGYQLSAAKDQCEDIDECQHRHLCAH | |
| | GQCRNTEGSFQCVCDQGYRASGLGDHCEDINECLEDKSVC | |
| | QRGDCINTAGSYDCTCPDGFQLDDNKTCQDINECEHPGLC | |
| | GPQGECLNTEGSFHCVCQQGFSISADGRTCEDIDECVNNTV | |
| | CDSHGFCDNTAGSFRCLCYQGFQAPQDGQGCVDVNECEL | |
| | LSGVCGEAFCENVEGSFLCVCADENQEYSPMTGQCRSRTS | |
| | TDLDVDVDQPKEEKKECYYNLNDASLCDNVLAPNVTKQE | |
| | CCCTSGVGWGDNCEIFPCPVLGTAEFTEMCPKGKGFVPAG | |
| | ESSSEAGGENYKDADECLLFGQEICKNGFCLNTRPGYECYC | |
| | KQGTYYDPVKLQCFDMDECQDPSSCIDGQCVNTEGSYNCF | |
| | CTHPMVLDASEKRCIRPAESNEQIEETDVYQDLCWEHLSDE | |
| | YVCSRPLVGKQTTYTECCCLYGEAWGMQCALCPLKDSDD | |
| | YAQLCNIPVTGRRQPYGRDALVDFSEQYTPEADPYFIQDRF | |
| | LNSFEELQAEECGILNGCENGRCVRVQEGYTCDCFDGYHL | |
| | DTAKMTCVDVNECDELNNRMSLCKNAKCINTDGSYKCLC | |
| | LPGYVPSDKPNYCTPLNTALNLEKDSDLE | |
| LTBP1S | NHTGRIKVVFTPSICKVTCTKGSCQNSCEKGNTTTLISENGH | 161 |
| | AADTLTATNFRVVICHLPCMNGGQCSSRDKCQCPPNFTGK | |
| | LCQIPVHGASVPKLYQHSQQPGKALGTHVIHSTHTLPLTVT | |
| | SQQGVKVKFPPNIVNIHVKHPPEASVQIHQVSRIDGPTGQK | |
| | TKEAQPGQSQVSYQGLPVQKTQTIHSTYSHQQVIPHVYPVA | |
| | AKTQLGRCFQETIGSQCGKALPGLSKQEDCCGTVGTSWGF | |
| | NKCQKCPKKPSYHGYNQMMECLPGYKRVNNTFCQDINEC | |
| | QLQGVCPNGECLNTMGSYRCTCKIGFGPDPTFSSCVPDPPV | |
| | ISEEKGPCYRLVSSGRQCMHPLSVHLTKQLCCCSVGKAWG | |
| | PHCEKCPLPGTAAFKEICPGGMGYTVSGVHRRRPIHHHVG | |
| | KGPVFVKPKNTQPVAKSTHPPPLPAKEEPVEALTFSREHGP | |
| | GVAEPEVATAPPEKEIPSLDQEKTKLEPGQPQLSPGISTIHLH | |
| | PQFPVVIEKTSPPVPVEVAPEASTSSASQVIAPTQVTEINECT | |
| | VNPDICGAGHCINLPVRYTCICYEGYRFSEQQRKCVDIDEC | |
| | TQVQHLCSQGRCENTEGSFLCICPAGFMASEEGTNCIDVDE | |
| | CLRPDVCGEGHCVNTVGAFRCEYCDSGYRMTQRGRCEDI | |
| | DECLNPSTCPDEQCVNSPGSYQCVPCTEGFRGWNGQCLDV | |
| | DECLEPNVCANGDCSNLEGSYMCSCHKGYTRTPDHKHCR | |
| | DIDECQQGNLCVNGQCKNTEGSFRCTCGQGYQLSAAKDQ | |
| | CEDIDECQHRHLCAHGQCRNTEGSFQCVCDQGYRASGLGD | |
| | HCEDINECLEDKSVCQRGDCINTAGSYDCTCPDGFQLDDN | |
| | KTCQDINECEHPGLCGPQGECLNTEGSFHCVCQQGFSISAD | |
| | GRTCEDIDECVNNTVCDSHGFCDNTAGSFRCLCYQGFQAP | |
| | QDGQGCVDVNECELLSGVCGEAFCENVEGSFLCVCADEN | |
| | QEYSPMTGQCRSRTSTDLDVDVDQPKEEKKECYYNLNDAS | |
| | LCDNVLAPNVTKQECCCTSGVGWGDNCEIFPCPVLGTAEF | |
| | TEMCPKGKGFVPAGESSSEAGGENYKDADECLLFGQEICK | |
| | NGFCLNTRPGYECYCKQGTYYDPVKLQCFDMDECQDPSS | |
| | CIDGQCVNTEGSYNCFCTHPMVLDASEKRCIRPAESNEQIE | |
| | ETDVYQDLCWEHLSDEYVCSRPLVGKQTTYTECCCLYGEA | |
| | WGMQCALCPLKDSDDYAQLCNIPVTGRRQPYGRDALVDF | |
| | SEQYTPEADPYFIQDRFLNSFEELQAEECGILNGCENGRCVR | |
| | VQEGYTCDCFDGYHLDTAKMTCVDVNECDELNNRMSLCK | |
| | NAKCINTDGSYKCLCLPGYVPSDKPNYCTPLNTALNLEKDS | |
| | DLE | |
| LTBP3 | GPAGERGAGGGGALARERFKVVFAPVICKRTCLKGQCRDS | 162 |
| | CQQGSNMTLIGENGHSTDTLTGSGFRVVVCPLPCMNGGQC | |
| | SSRNQCLCPPDFTGRFCQVPAGGAGGGTGGSGPGLSRTGA | |
| | LSTGALPPLAPEGDSVASKHAIYAVQVIADPPGPGEGPPAQ | |
| | HAAFLVPLGPGQISAEVQAPPPVVNVRVHHPPEASVQVHRI | |
| | ESSNAESAAPSQHLLPHPKPSHPRPPTQKPLGRCFQDTLPKQ | |
| | PCGSNPLPGLTKQEDCCGSIGTAWGQSKCHKCPQLQYTGV | |
| | QKPGPVRGEVGADCPQGYKRLNSTHCQDINECAMPGVCR | |
| | HGDCLNNPGSYRCVCPPGHSLGPSRTQCIADKPEEKSLCFR | |
| | LVSPEHQCQHPLTTRLTRQLCCCSVGKAWGARCQRCPTDG | |
| | TAAFKEICPAGKGYHILTSHQTLTIQGESDFSLFLHPDGPPK | |
| | PQQLPESPSQAPPPEDTEEERGVTTDSPVSEERSVQQSHPTA | |
| | TTTPARPYPELISRPSPPTMRWFLPDLPPSRSAVEIAPTQVTE | |
| | TDECRLNQNICGHGECVPGPPDYSCHCNPGYRSHPQHRYC | |
| | VDVNECEAEPCGPGRGICMNTGGSYNCHCNRGYRLHVGA | |
| | GGRSCVDLNECAKPHLCGDGGFCINFPGHYKCNCYPGYRL | |
| | KASRPPVCEDIDECRDPSSCPDGKCENKPGSFKCIACQPGY | |
| | RSQGGGACRDVNECAEGSPCSPGWCENLPGSFRCTCAQGY | |
| | APAPDGRSCLDVDECEAGDVCDNGICSNTPGSFQCQCLSG | |
| | YHLSRDRSHCEDIDECDFPAACIGGDCINTNGSYRCLCPQG | |
| | HRLVGGRKCQDIDECSQDPSLCLPHGACKNLQGSYVCVCD | |
| | EGFTPTQDQHGCEEVEQPHHKKECYLNFDDTVFCDSVLAT | |
| | NVTQQECCCSLGAGWGDHCEIYPCPVYSSAEFHSLCPDGK | |
| | GYTQDNNIVNYGIPAHRDIDECMLFGSEICKEGKCVNTQPG | |
| | YECYCKQGFYYDGNLLECVDVDECLDESNCRNGVCENTR | |
| | GGYRCACTPPAEYSPAQRQCLSPEEMDVDECQDPAACRPG | |
| | RCVNLPGSYRCECRPPWVPGPSGRDCQLPESPAERAPERRD | |
| | VCWSQRGEDGMCAGPLAGPALTFDDCCCRQGRGWGAQC | |
| | RPCPPRGAGSHCPTSQSESNSFWDTSPLLLGKPPRDEDSSEE | |
| | DSDECRCVSGRCVPRPGGAVCECPGGFQLDASRARCVDID | |
| | ECRELNQRGLLCKSERCVNTSGSFRCVCKAGFARSRPHGA | |
| | CVPQRRR | |
| LTBP3 EGF-like | DIDECMLFGSEICKEGKCVNTQPGYECYCKQGFYYDGNLL | 163 |
| domain, module 1 | ECVDVDECLDESNCRNGVCENTRGGYRCACTPPAEYSPAQ | |
| | RQCLSP | |
| LTBP3 EGF-like | DVDECQDPAACRPGRCVNLPGSYRCECRPPWVPGPSGRDC | 164 |
| domain, module 2 | QLP | |
| LTBP3 EGF-like | DIDECSQDPSLCLPHGACKNLQGSYVCVCDEGFTPTQDQH | 165 |
| domain, module 3 | GCE | |
| LTBP3 EGF-like | DIDECMLFGSEICKEGKCVNTQPGYECYCKQGFYYDGNLL | 166 |
| domain, module 4 | ECV | |
| TB domain, module 1 | KKECYLNFDDTVFCDSVLATNVTQQECCCSLGAGWGDHC | 167 |
| | EIYPCPVYSSAEFHSLCP | |
| TB domain, module 2 | DVCWSQRGEDGMCAGPLAGPALTFDDCCCRQGRGWGAQ | 168 |
| | CRPCPPRGAGSHCP | |
| L3-TB3TB4 isoform 1 | KKECYLNFDDTVFCDSVLATNVTQQECCCSLGAGWGDHC | 169 |
| | EIYPCPVYSSAEFHSLCPDGKGYTQDNNIVNYGIPAHRDIDE | |
| | CMLFGSEICKEGKCVNTQPGYECYCKQGFYYDGNLLECVD | |
| | VDECLDESNCRNGVCENTRGGYRCACTPPAEYSPAQRQCL | |
| | SPEEMDVDECQDPAACRPGRCVNLPGSYRCECRPPWVPGP | |
| | SGRDCQLPESPAERAPERRDVCWSQRGEDGMCAGPLAGP | |
| | ALTFDDCCCRQGRGWGAQCRPCPPRGAGSHCPTSQSE | |
| L3-TB3TB4 isoform 2 | KKECYLNFDDTVFCDSVLATNVTQQECCCSLGAGWGDHC | 170 |
| | EIYPCPVYSSAEFHSLCPDGKGYTQDNNIVNYGIPAHRDIDE | |
| | CMLFGSEICKEGKCVNTQPGYECYCKQGFYYDGNLLECVD | |
| | VDECLDESNCRNGVCENTRGGYRCACTPPAEYSPAQRQCL | |
| | SPEEMERAPERRDVCWSQRGEDGMCAGPLAGPALTFDDC | |
| | CCRQGRGWGAQCRPCPPRGAGSHCPTSQSE | |
| L3-ETB3E, type 1 | DIDECSQDPSLCLPHGACKNLQGSYVCVCDEGFTPTQDQH | 171 |
| | GCEEVEQPHHKKECYLNFDDTVFCDSVLATNVTQQECCCS | |
| | LGAGWGDHCEIYPCPVYSSAEFHSLCPDGKGYTQDNNIVN | |
| | YGIPAHRDIDECMLFGSEICKEGKCVNTQPGYECYCKQGFY | |
| | YDGNLLECVDVDE | |
| L3-ETB3E, type 2 | QDIDECSQDPSLCLPHGACKNLQGSYVCVCDEGFTPTQDQ | 172 |
| | HGCEEVEQPHHKKECYLNFDDTVFCDSVLATNVTQQECCC | |
| | SLGAGWGDHCEIYPCPVYSSAEFHSLCPDGKGYTQDNNIV | |
| | NYGIPAHRDIDECMLFGSEICKEGKCVNTQPGYECYCKQGF | |
| | YYDGNLLECVDVDE | |
| L3-ETB3E, type 3 | DIDECSQDPSLCLPHGACKNLQGSYVCVCDEGFTPTQDQH | 173 |
| | GCEEVEQPHHKKECYLNFDDTVFCDSVLATNVTQQECCCS | |
| | LGAGWGDHCEIYPCPVYSSAEFHSLCPDGKGYTQDNNIVN | |
| | YGIPAHRDIDECMLFGSEICKEGKCVNTQPGYECYCKQGFY | |
| | YDGNLLECV | |
| L3-ETB3E, type 4 | QDIDECSQDPSLCLPHGACKNLQGSYVCVCDEGFTPTQDQ | 174 |
| | HGCEEVEQPHHKKECYLNFDDTVFCDSVLATNVTQQECCC | |
| | SLGAGWGDHCEIYPCPVYSSAEFHSLCPDGKGYTQDNNIV | |
| | NYGIPAHRDIDECMLFGSEICKEGKCVNTQPGYECYCKQGF | |
| | YYDGNLLECV | |
| L3-ETB3E, type 1N | SSGDIDECSQDPSLCLPHGACKNLQGSYVCVCDEGFTPTQD | 175 |
| | QHGCEEVEQPHHKKECYLNFDDTVFCDSVLATNVTQQECC | |
| | CSLGAGWGDHCEIYPCPVYSSAEFHSLCPDGKGYTQDNNI | |
| | VNYGIPAHRDIDECMLFGSEICKEGKCVNTQPGYECYCKQ | |
| | GFYYDGNLLECVDVDE | |
| L3-ETB3E, type 2N | SSGQDIDECSQDPSLCLPHGACKNLQGSYVCVCDEGFTPTQ | 176 |
| | DQHGCEEVEQPHHKKECYLNFDDTVFCDSVLATNVTQQE | |
| | CCCSLGAGWGDHCEIYPCPVYSSAEFHSLCPDGKGYTQDN | |
| | NIVNYGIPAHRDIDECMLFGSEICKEGKCVNTQPGYECYCK | |
| | QGFYYDGNLLECVDVDE | |
| L3-ETB3E, type 3N | SSGDIDECSQDPSLCLPHGACKNLQGSYVCVCDEGFTPTQD | 177 |
| | QHGCEEVEQPHHKKECYLNFDDTVFCDSVLATNVTQQECC | |
| | CSLGAGWGDHCEIYPCPVYSSAEFHSLCPDGKGYTQDNNI | |
| | VNYGIPAHRDIDECMLFGSEICKEGKCVNTQPGYECYCKQ | |
| | GFYYDGNLLECV | |
| L3-ETB3E, type 4N | SSGQDIDECSQDPSLCLPHGACKNLQGSYVCVCDEGFTPTQ | 178 |
| | DQHGCEEVEQPHHKKECYLNFDDTVFCDSVLATNVTQQE | |
| | CCCSLGAGWGDHCEIYPCPVYSSAEFHSLCPDGKGYTQDN | |
| | NIVNYGIPAHRDIDECMLFGSEICKEGKCVNTQPGYECYCK | |
| | QGFYYDGNLLECV | |
| L1-ETB3E, type 1 | GQGCVDVNECELLSGVCGEAFCENVEGSFLCVCADENQEY | 179 |
| | SPMTGQCRSRTSTDLDVDVDQPKEEKKECYYNLNDASLCD | |
| | NVLAPNVTKQECCCTSGVGWGDNCEIFPCPVLGTAEFTEM | |
| | CPKGKGFVPAGESSSEAGGENYKDADECLLFGQEICKNGF | |
| | CLNTRPGYECYCKQGTYYDPVKLQCF | |
| L1-ETB3-C-term, type 1 | GQGCVDVNECELLSGVCGEAFCENVEGSFLCVCADENQEY | 180 |
| | SPMTGQCRSRTSTDLDVDVDQPKEEKKECYYNLNDASLCD | |
| | NVLAPNVTKQECCCTSGVGWGDNCEIFPCPVLGTAEFTEM | |
| | CPKGKGFVPAGESSSEAGGENYKDADECLLFGQEICKNGF | |
| | CLNTRPGYECYCKQGTYYDPVKLQCFDMDECQDPSSCIDG | |
| | QCVNTEGSYNCFCTHPMVLDASEKRCIRPAESNEQIEETDV | |
| | YQDLCWEHLSDEYVCSRPLVGKQTTYTECCCLYGEAWGM | |
| | QCALCPLKDSDDYAQLCNIPVTGRRQPYGRDALVDFSEQY | |
| | TPEADPYFIQDRFLNSFEELQAEECGILNGCENGRCVRVQE | |
| | GYTCDCFDGYHLDTAKMTCVDVNECDELNNRMSLCKNA | |
| | KCINTDGSYKCLCLPGYVPSDKPNYCTPLNTALNLEKDSDLE | |
| L1-ETB3E, type 2 | NECELLSGVCGEAFCENVEGSFLCVCADENQEYSPMTGQC | 158 |
| | RSRTSTDLDVDVDQPKEEKKECYYNLNDASLCDNVLAPNV | |
| | TKQECCCTSGVGWGDNCEIFPCPVLGTAEFTEMCPKGKGF | |
| | VPAGESSSEAGGENYKDADECLLFGQEICKNGFCLNTRPGY | |
| | ECYCKQGTYYDPVKLQCF | |
| L1-ETB3-C-term, type 2 | NECELLSGVCGEAFCENVEGSFLCVCADENQEYSPMTGQC | 181 |
| | RSRTSTDLDVDVDQPKEEKKECYYNLNDASLCDNVLAPNV | |
| | TKQECCCTSGVGWGDNCEIFPCPVLGTAEFTEMCPKGKGF | |
| | VPAGESSSEAGGENYKDADECLLFGQEICKNGFCLNTRPGY | |
| | ECYCKQGTYYDPVKLQCFDMDECQDPSSCIDGQCVNTEGS | |
| | YNCFCTHPMVLDASEKRCIRPAESNEQIEETDVYQDLCWE | |
| | HLSDEYVCSRPLVGKQTTYTECCCLYGEAWGMQCALCPL | |
| | KDSDDYAQLCNIPVTGRRQPYGRDALVDFSEQYTPEADPY | |
| | FIQDRFLNSFEELQAEECGILNGCENGRCVRVQEGYTCDCF | |
| | DGYHLDTAKMTCVDVNECDELNNRMSLCKNAKCINTDGS | |
| | YKCLCLPGYVPSDKPNYCTPLNTALNLEKDSDLE | |
| L1-ETB3E, type 3 | DVNECELLSGVCGEAFCENVEGSFLCVCADENQEYSPMTG | 182 |
| | QCRSRTSTDLDVDVDQPKEEKKECYYNLNDASLCDNVLAP | |
| | NVTKQECCCTSGVGWGDNCEIFPCPVLGTAEFTEMCPKGK | |
| | GFVPAGESSSEAGGENYKDADECLLFGQEICKNGFCLNTRP | |
| | GYECYCKQGTYYDPVKLQCF | |
| L1-EETB3EE | DIDECVNNTVCDSHGFCDNTAGSFRCLCYQGFQAPQDGQG | 183 |
| | CVDVNECELLSGVCGEAFCENVEGSFLCVCADENQEYSPM | |
| | TGQCRSRTSTDLDVDVDQPKEEKKECYYNLNDASLCDNVL | |
| | APNVTKQECCCTSGVGWGDNCEIFPCPVLGTAEFTEMCPK | |
| | GKGFVPAGESSSEAGGENYKDADECLLFGQEICKNGFCLN | |
| | TRPGYECYCKQGTYYDPVKLQCFDMDECQDPSSCIDGQCV | |
| | NTEGSYNCFCTHPMVLDASEKRCI | |
| L1-E11-TB3 | EINECTVNPDICGAGHCINLPVRYTCICYEGYRFSEQQRKCV | 184 |
| | DIDECTQVQHLCSQGRCENTEGSFLCICPAGFMASEEGTNCI | |
| | DVDECLRPDVCGEGHCVNTVGAFRCEYCDSGYRMTQRGR | |
| | CEDIDECLNPSTCPDEQCVNSPGSYQCVPCTEGFRGWNGQ | |
| | CLDVDECLEPNVCANGDCSNLEGSYMCSCHKGYTRTPDH | |
| | KHCRDIDECQQGNLCVNGQCKNTEGSFRCTCGQGYQLSA | |
| | AKDQCEDIDECQHRHLCAHGQCRNTEGSFQCVCDQGYRA | |
| | SGLGDHCEDINECLEDKSVCQRGDCINTAGSYDCTCPDGFQ | |
| | LDDNKTCQDINECEHPGLCGPQGECLNTEGSFHCVCQQGF | |
| | SISADGRTCEDIDECVNNTVCDSHGFCDNTAGSFRCLCYQG | |
| | FQAPQDGQGCVDVNECELLSGVCGEAFCENVEGSFLCVCA | |
| | DENQEYSPMTGQCRSRTSTDLDVDVDQPKEEKKECYYNL | |
| | NDASLCDNVLAPNVTKQECCCTSGVGWGDNCEIFPCPVLG | |
| | TAEFTEMCPKGKGFVPAGESSSEAGGENYKDA | |
| L1-E11-TB3EE | EINECTVNPDICGAGHCINLPVRYTCICYEGYRFSEQQRKCV | 185 |
| | DIDECTQVQHLCSQGRCENTEGSFLCICPAGFMASEEGTNCI | |
| | DVDECLRPDVCGEGHCVNTVGAFRCEYCDSGYRMTQRGR | |
| | CEDIDECLNPSTCPDEQCVNSPGSYQCVPCTEGFRGWNGQ | |
| | CLDVDECLEPNVCANGDCSNLEGSYMCSCHKGYTRTPDH | |
| | KHCRDIDECQQGNLCVNGQCKNTEGSFRCTCGQGYQLSA | |
| | AKDQCEDIDECQHRHLCAHGQCRNTEGSFQCVCDQGYRA | |
| | SGLGDHCEDINECLEDKSVCQRGDCINTAGSYDCTCPDGFQ | |
| | LDDNKTCQDINECEHPGLCGPQGECLNTEGSFHCVCQQGF | |
| | SISADGRTCEDIDECVNNTVCDSHGFCDNTAGSFRCLCYQG | |
| | FQAPQDGQGCVDVNECELLSGVCGEAFCENVEGSFLCVCA | |
| | DENQEYSPMTGQCRSRTSTDLDVDVDQPKEEKKECYYNL | |
| | NDASLCDNVLAPNVTKQECCCTSGVGWGDNCEIFPCPVLG | |
| | TAEFTEMCPKGKGFVPAGESSSEAGGENYKDADECLLFGQ | |
| | EICKNGFCLNTRPGYECYCKQGTYYDPVKLQCFDMDECQD | |
| | PSSCIDGQCVNTEGSYNCFCTHPMVLDASEKRCI | |
| L1-ΔN441 | STHPPPLPAKEEPVEALTFSREHGPGVAEPEVATAPPEKEIP | 186 |
| | SLDQEKTKLEPGQPQLSPGISTIHLHPQFPVVIEKTSPPVPVE | |
| | VAPEASTSSASQVIAPTQVTEINECTVNPDICGAGHCINLPV | |
| | RYTCICYEGYRFSEQQRKCVDIDECTQVQHLCSQGRCENTE | |
| | GSFLCICPAGFMASEEGTNCIDVDECLRPDVCGEGHCVNTV | |
| | GAFRCEYCDSGYRMTQRGRCEDIDECLNPSTCPDEQCVNS | |
| | PGSYQCVPCTEGFRGWNGQCLDVDECLEPNVCANGDCSN | |
| | LEGSYMCSCHKGYTRTPDHKHCRDIDECQQGNLCVNGQC | |
| | KNTEGSFRCTCGQGYQLSAAKDQCEDIDECQHRHLCAHGQ | |
| | CRNTEGSFQCVCDQGYRASGLGDHCEDINECLEDKSVCQR | |
| | GDCINTAGSYDCTCPDGFQLDDNKTCQDINECEHPGLCGP | |
| | QGECLNTEGSFHCVCQQGFSISADGRTCEDIDECVNNTVCD | |
| | SHGFCDNTAGSFRCLCYQGFQAPQDGQGCVDVNECELLSG | |
| | VCGEAFCENVEGSFLCVCADENQEYSPMTGQCRSRTSTDL | |
| | DVDVDQPKEEKKECYYNLNDASLCDNVLAPNVTKQECCC | |
| | TSGVGWGDNCEIFPCPVLGTAEFTEMCPKGKGFVPAGESSS | |
| | EAGGENYKDADECLLFGQEICKNGFCLNTRPGYECYCKQG | |
| | TYYDPVKLQCFDMDECQDPSSCIDGQCVNTEGSYNCFCTH | |
| | PMVLDASEKRCIRPAESNEQIEETDVYQDLCWEHLSDEYV | |
| | CSRPLVGKQTTYTECCCLYGEAWGMQCALCPLKDSDDYA | |
| | QLCNIPVTGRRQPYGRDALVDFSEQYTPEADPYFIQDRFLN | |
| | SFEELQAEECGILNGCENGRCVRVQEGYTCDCFDGYHLDT | |
| | AKMTCVDVNECDELNNRMSLCKNAKCINTDGSYKCLCLP | |
| | GYVPSDKPNYCTPLNTALNLEKDSDLE | |
| L3-E8TB3EE | ETDECRLNQNICGHGECVPGPPDYSCHCNPGYRSHPQHRY | 382 |
| | CVDVNECEAEPCGPGRGICMNTGGSYNCHCNRGYRLHVG | |
| | AGGRSCVDLNECAKPHLCGDGGFCINFPGHYKCNCYPGYR | |
| | LKASRPPVCEDIDECRDPSSCPDGKCENKPGSFKCIACQPG | |
| | YRSQGGGACRDVNECAEGSPCSPGWCENLPGSFRCTCAQG | |
| | YAPAPDGRSCLDVDECEAGDVCDNGICSNTPGSFQCQCLS | |
| | GYHLSRDRSHCEDIDECDFPAACIGGDCINTNGSYRCLCPQ | |
| | GHRLVGGRKCQDIDECSQDPSLCLPHGACKNLQGSYVCVC | |
| | DEGFTPTQDQHGCEEVEQPHHKKECYLNFDDTVFCDSVLA | |
| | TNVTQQECCCSLGAGWGDHCEIYPCPVYSSAEFHSLCPDG | |
| | KGYTQDNNIVNYGIPAHRDIDECMLFGSEICKEGKCVNTQP | |
| | GYECYCKQGFYYDGNLLECVDVDECLDESNCRNGVCENT | |
| | RGGYRCACTPPAEYSPAQRQCL | |

[0082] In some embodiments, LTBPs may comprise detectable labels. Detectable labels may be used to allow for detection and/or isolation of recombinant proteins comprising LTBPs. Some detectable labels may comprise biotin labels, polyhistidine tags and/or flag tags. Such tags may be used to isolate tagged proteins. Proteins produced may comprise additional amino acids encoding one or more 3C protease cleavage site. Such sites allow for cleavage at the 3C protease cleavage site upon treatment with 3C protease, including, but not limited to rhinovirus 3C protease. Such cleavage sites may be introduced to allow for removal of detectable labels from recombinant proteins.

[0083] In some embodiments, GARPs, including, but not limited to recombinant forms of GARP, may be complexed with recombinant GPCs. Some recombinant GPCs of the present invention may be co-expressed with GARPs to ensure proper folding and/or expression. In other embodiments, the GARP homologue, leucine rich repeat containing 33 (LRRC33), or fragments and/or mutants thereof may be substituted for GARP [also referred to herein as leucine rich repeat containing 32 (LRRC32)]. Such LRRC33 fragments and/or mutants may comprise one or more regions from the LRRC33 sequence listed in Table 10 below. Recombinant GARPs may also comprise mutants and/or GARP fragments. Some recombinant GARPs may be soluble (referred to herein as sGARP).

[0084] In some embodiments, recombinant GARPs may comprise one or more amino acid sequences listed in Table 10. Some recombinant GARPs used herein may be expressed without the N-terminal residues AQ. Expressed GARPs may comprise detectable labels. Such detectable labels may be used to allow for detection and/or isolation. Some detectable labels may comprise biotin labels, polyhistidine tags and/or flag tags. Such tags may be used to isolate tagged proteins. Proteins produced may comprise additional amino acids encoding one or more 3C protease cleavage site. Such sites allow for cleavage at the 3C protease cleavage site upon treatment with 3C protease, including, but not limited to rhinovirus 3C protease. 3C protease cleavage sites may be introduced to allow for removal of detectable labels from recombinant proteins. In some cases, these sequences are expressed in association with N- and/or C-terminal secretion signal sequences [e.g. human Ig kappa chains with amino acid sequence MDMRVPAQLLGLLLLWFSGVLG (SEQ ID NO: 99)], flag tag sequences [e.g. DYKDDDDK (SEQ ID NO: 100)], one or more 3C protease cleavage site [e.g. LEVLFQGP (SEQ ID NO: 101)], one or more biotinylation site and/or His-tag sequences [e.g. HHHHHH (SEQ ID NO: 102)].

TABLE 10
GARP sequences

| Protein | Sequence | SEQ ID NO |
|---|---|---|
| GARP | AQHQDKVPCKMVDKKVSCQVLGLLQVPSVLPPDTETLDLS | 187 |
| | GNQLRSILASPLGFYTALRHLDLSTNEISFLQPGAFQALTHL | |
| | EHLSLAHNRLAMATALSAGGLGPLPRVTSLDLSGNSLYSG | |
| | LLERLLGEAPSLHTLSLAENSLTRLTRHTFRDMPALEQLDL | |
| | HSNVLMDIEDGAFEGLPRLTHLNLSRNSLTCISDFSLQQLRV | |
| | LDLSCNSIEAFQTASQPQAEFQLTWLDLRENKLLHFPDLAA | |
| | LPRLIYLNLSNNLIRLPTGPPQDSKGIHAPSEGWSALPLSAPS | |
| | GNASGRPLSQLLNLDLSYNEIELIPDSFLEHLTSLCFLNLSRN | |
| | CLRTFEARRLGSLPCLMLLDLSHNALETLELGARALGSLRT | |
| | LLLQGNALRDLPPYTFANLASLQRLNLQGNRVSPCGGPDEP | |
| | GPSGCVAFSGITSLRSLSLVDNEIELLRAGAFLHTPLTELDLS | |
| | SNPGLEVATGALGGLEASLEVLALQGNGLMVLQVDLPCFI | |
| | CLKRLNLAENRLSHLPAWTQAVSLEVLDLRNNSFSLLPGSA | |
| | MGGLETSLRRLYLQGNPLSCCGNGWLAAQLHQGRVDVDA | |
| | TQDLICRFSSQEEVSLSHVRPEDCEKGGLKNINLIIILTFILVS | |
| | AILLTTLAACCCVRRQKFNQQYKA | |
| sGARP | AQHQDKVPCKMVDKKVSCQVLGLLQVPSVLPPDTETLDLS | 188 |
| | GNQLRSILASPLGFYTALRHLDLSTNEISFLQPGAFQALTHL | |
| | EHLSLAHNRLAMATALSAGGLGPLPRVTSLDLSGNSLYSG | |
| | LLERLLGEAPSLHTLSLAENSLTRLTRHTFRDMPALEQLDL | |
| | HSNVLMDIEDGAFEGLPRLTHLNLSRNSLTCISDFSLQQLRV | |
| | LDLSCNSIEAFQTASQPQAEFQLTWLDLRENKLLHFPDLAA | |
| | LPRLIYLNLSNNLIRLPTGPPQDSKGIHAPSEGWSALPLSAPS | |
| | GNASGRPLSQLLNLDLSYNEIELIPDSFLEHLTSLCFLNLSRN | |
| | CLRTFEARRLGSLPCLMLLDLSHNALETLELGARALGSLRT | |
| | LLLQGNALRDLPPYTFANLASLQRLNLQGNRVSPCGGPDEP | |
| | GPSGCVAFSGITSLRSLSLVDNEIELLRAGAFLHTPLTELDLS | |
| | SNPGLEVATGALGGLEASLEVLALQGNGLMVLQVDLPCFI | |
| | CLKRLNLAENRLSHLPAWTQAVSLEVLDLRNNSFSLLPGSA | |
| | MGGLETSLRRLYLQGNPLSCCGNGWLAAQLHQGRVDVDA | |
| | TQDLICRFSSQEEVSLSHVRPEDCEKGGLKNIN | |
| LRRC33 | WRNRSGTATAASQGVCKLVGGAADCRGQSLASVPSSLPPH | 189 |
| | ARMLTLDANPLKTLWNHSLQPYPLLESLSLHSCHLERISRG | |
| | AFQEQGHLRSLVLGDNCLSENYEETAAALHALPGLRRLDL | |
| | SGNALTEDMAALMLQNLSSLRSVSLAGNTIMRLDDSVFEG | |
| | LERLRELDLQRNYIFEIEGGAFDGLAELRHLNLAFNNLPCIV | |
| | DFGLTRLRVLNVSYNVLEWFLATGGEAAFELETLDLSHNQ | |
| | LLFFPLLPQYSKLRTLLLRDNNMGFYRDLYNTSSPREMVA | |
| | QFLLVDGNVTNITTVSLWEEFSSSDLADLRFLDMSQNQFQY | |
| | LPDGFLRKMPSLSHLNLHQNCLMTLHIREHEPPGALTELDL | |
| | SHNQLSELHLAPGLASCLGSLRLFNLSSNQLLGVPPGLFAN | |
| | ARNITTLDMSHNQISLCPLPAASDRVGPPSCVDFRNMASLR | |
| | SLSLEGCGLGALPDCPFQGTSLTYLDLSSNWGVLNGSLAPL | |
| | QDVAPMLQVLSLRNMGLHSSFMALDFSGFGNLRDLDLSG | |
| | NCLTTFPRFGGSLALETLDLRRNSLTALPQKAVSEQLSRGL | |
| | RTIYLSQNPYDCCGVDGWGALQHGQTVADWAMVTCNLSS | |
| | KIIRVTELPGGVPRDCKWERLDLGLLYLVLILPSCLTLLVAC | |
| | TVIVLTFKKPLLQVIKSRCHWSSVY | |
| sLRRC33 | WRNRSGTATAASQGVCKLVGGAADCRGQSLASVPSSLPPH | 190 |
| | ARMLTLDANPLKTLWNHSLQPYPLLESLSLHSCHLERISRG | |
| | AFQEQGHLRSLVLGDNCLSENYEETAAALHALPGLRRLDL | |
| | SGNALTEDMAALMLQNLSSLRSVSLAGNTIMRLDDSVFEG | |
| | LERLRELDLQRNYIFEIEGGAFDGLAELRHLNLAFNNLPCIV | |
| | DFGLTRLRVLNVSYNVLEWFLATGGEAAFELETLDLSHNQ | |
| | LLFFPLLPQYSKLRTLLLRDNNMGFYRDLYNTSSPREMVA | |
| | QFLLVDGNVTNITTVSLWEEFSSSDLADLRFLDMSQNQFQY | |
| | LPDGFLRKMPSLSHLNLHQNCLMTLHIREHEPPGALTELDL | |
| | SHNQLSELHLAPGLASCLGSLRLFNLSSNQLLGVPPGLFAN | |
| | ARNITTLDMSHNQISLCPLPAASDRVGPPSCVDFRNMASLR | |
| | SLSLEGCGLGALPDCPFQGTSLTYLDLSSNWGVLNGSLAPL | |
| | QDVAPMLQVLSLRNMGLHSSFMALDFSGFGNLRDLDLSG | |
| | NCLTTFPRFGGSLALETLDLRRNSLTALPQKAVSEQLSRGL | |
| | RTIYLSQNPYDCCGVDGWGALQHGQTVADWAMVTCNLSS | |
| | KIIRVTELPGGVPRDCKWERLDLGL | |

[0085] GPCs bound to LTBPs may adopt three dimensional conformations that are distinct from conformations found with GPCs bound to GARP or other matrix proteins. This may be due, in some cases, to the presence of cysteines available on LTBP for disulfide bond formation with GPCs that comprise a different distance from one another than corresponding cysteines available for disulfide bond formation on GARP. Such differences in three dimensional conformations may provide unique conformation-dependent epitopes on GPCs. In some embodiments, antibodies of the invention are directed to such conformation-dependent epitopes. Such antibodies may function selectively to activate or inhibit growth factor activity depending on the identity of bound protein (e.g. LTBP or GARP). In some cases, different conformation-dependent epitopes may be present on N-terminal alpha helices of proTGF-β when bound to LTBP or GARP.

[0086] Recombinant proteins of the present invention may be coexpressed with GDF-associated serum protein (GASP) 1 and/or GASP-2. Such recombinant proteins may include, but are not limited to GDF-8 and/or GDF-11. GASPs are circulating proteins that bind and prevent activity of GDF-8 and GDF-11 (Hill, J. J. et al., 2003. Mol Endocrinology. 17(6):1144-54 and Hill, J. J. et al., 2002. JBC. 277(43):40735-41, the contents of each of which are herein incorporated by reference in their entirety). Interestingly, GDF-8 and GDF-11 growth factors are not found free in serum. About 70% are in GPCs with the remaining 30% associated with GASPs as well as other proteins (e.g. follistatin, follistatin-like related gene and decorin). Studies using mice lacking expression of GASP-1 and/or GASP-2 display phenotypes indicative of myostatin and/or GDF-11 overactivity (Lee et al., 2013. PNAS. 110(39):E3713-22). GASP bound GDF-8 and/or GDF-11 are unable to bind type II receptors and transmit related cellular signals. In some cases, recombinant proteins of the present invention may comprise one or more of the GASP sequences listed in Table 11. In some cases, these sequences are expressed in association with N- and/or C-terminal secretion signal sequences [e.g. human Ig kappa chains with amino acid sequence MDMRVPAQLLGLLLLWFSGVLG (SEQ ID NO: 99)], flag tag sequences [e.g. DYKDDDDK (SEQ ID NO: 100)], one or more 3C protease cleavage site [e.g. LEVLFQGP (SEQ ID NO: 101)], one or more biotinylation site and/or His-tag sequences [e.g. HHHHHH (SEQ ID NO: 102)].

TABLE 11
GASP Sequences

| | | SEQ |
|---|---|---|
| | | ID |
| Protein | Sequence | NO |
| GASP1, | MWAPRCRRFWSRWEQVAALLLLLLLLGVPPRSL | 191 |
| NP_783165.1 | ALPPIRYSHAGICPNDMNPNLWVDAQSTCRRECE | |
| | TDQECETYEKCCPNVCGTKSCVAARYMDVKGKK | |
| | GPVGMPKEATCDHFMCLQQGSECDIWDGQPVCK | |
| | CKDRCEKEPSFTCASDGLTYYNRCYMDAEACSK | |
| | GITLAVVTCRYHFTWPNTSPPPPETTMHPTTASPE | |
| | TPELDMAAPALLNNPVHQSVTMGETVSFLCDVV | |
| | GRPRPEITWEKQLEDRENVVMRPNHVRGNVVVT | |
| | NIAQLVIYNAQLQDAGIYTCTARNVAGVLRADFP | |
| | LSVVRGHQAAATSESSPNGTAFPAAECLKPPDSED | |
| | CGEEQTRWHFDAQANNCLTFTFGHCHRNLNHFE | |
| | TYEACMLACMSGPLAACSLPALQGPCKAYAPRW | |
| | AYNSQTGQCQSFVYGGCEGNGNNFESREACEESC | |
| | PFPRGNQRCRACKPRQKLVTSFCRSDFVILGRVSE | |
| | LTEEPDSGRALVTVDEVLKDEKMGLKFLGQEPLE | |
| | VTLLHVDWACPCPNVTVSEMPLIIMGEVDGGMA | |
| | MLRPDSFVGASSARRVRKLREVMHKKTCDVLKE | |
| | FLGLH | |
| GASP1, | SVVRGHQAAATSESSPNGTAFPAAECLKPPDSED | 192 |
| residue | CGEEQTRWHFDAQANNCLTFTFGHCHRNLNHFE | |
| 303-576 of | TYEACMLACMSGPLAACSLPALQGPCKAYAPRW | |
| NP_783165.1 | AYNSQTGQCQSFVYGGCEGNGNNFESREACEESC | |
| | PFPRGNQRCRACKPRQKLVTSFCRSDFVILGRVSE | |
| | LTEEPDSGRALVTVDEVLKDEKMGLKFLGQEPLE | |
| | VTLLHVDWACPCPNVTVSEMPLIIMGEVDGGMA | |
| | MLRPDSFVGASSARRVRKLREVMHKKTCDVLKE | |
| | FLGLH | |
| GASP1, | LPPIRYSHAGICPNDMNPNLWVDAQSTCRRECET | 193 |
| residue | DQECETYEKCCPNVCGTKSCVAARYMDVKGKK | |
| 35-576 of | GPVGMPKEATCDHFMCLQQGSECDIWDGQPVCK | |
| NP_783165.1 | CKDRCEKEPSFTCASDGLTYYNRCYMDAEACSK | |
| | GITLAVVTCRYHFTWPNTSPPPPETTMHPTTASPE | |
| | TPELDMAAPALLNNPVHQSVTMGETVSFLCDVV | |
| | GRPRPEITWEKQLEDRENVVMRPNHVRGNVVVT | |
| | NIAQLVIYNAQLQDAGIYTCTARNVAGVLRADFP | |
| | LSVVRGHQAAATSESSPNGTAFPAAECLKPPDSED | |
| | CGEEQTRWHFDAQANNCLTFTFGHCHRNLNHFE | |
| | TYEACMLACMSGPLAACSLPALQGPCKAYAPRW | |
| | AYNSQTGQCQSFVYGGCEGNGNNFESREACEESC | |
| | PFPRGNQRCRACKPRQKLVTSFCRSDFVILGRVSE | |
| | LTEEPDSGRALVTVDEVLKDEKMGLKFLGQEPLE | |
| | VTLLHVDWACPCPNVTVSEMPLIIMGEVDGGMA | |
| | MLRPDSFVGASSARRVRKLREVMHKKTCDVLKE | |
| | FLGLH | |
| GASP1, | AACSLPALQGPCKAYAPRWAYNSQTGQCQSFVY | 194 |
| residue | GGCEGNGNNFESREACEESCPFPRGNQRCRACKP | |
| 384-576 of | RQKLVTSFCRSDFVILGRVSELTEEPDSGRALVTV | |
| NP_783165.1 | DEVLKDEKMGLKFLGQEPLEVTLLHVDWACPCP | |
| | NVTVSEMPLIIMGEVDGGMAMLRPDSFVGASSAR | |
| | RVRKLREVMHKKTCDVLKEFLGLH | |
| GASP1, | FPRGNQRCRACKPRQKLVTSFCRSDFVILGRVSEL | 195 |
| residue | TEEPDSGRALVTVDEVLKDEKMGLKFLGQEPLEV | |
| 438-576 of | TLLHVDWACPCPNVTVSEMPLIIMGEVDGGMAM | |
| NP_783165.1 | LRPDSFVGASSARRVRKLREVMHKKTCDVLKEFL | |
| | GLH | |
| GASP, | MPALRPLLPLLLLLRLTSGAGLLPGLGSHPGVCPN | 196 |
| NP_444514.1 | QLSPNLWVDAQSTCERECSRDQDCAAAEKCCINV | |
| | CGLHSCVAARFPGSPAAPTTAASCEGFVCPQQGS | |
| | DCDIWDGQPVCRCRDRCEKEPSFTCASDGLTYYN | |
| | RCYMDAEACLRGLHLHIVPCKHVLSWPPSSPGPP | |
| | ETTARPTPGAAPVPPALYSSPSPQAVQVGGTASLH | |
| | CDVSGRPPPAVTWEKQSHQRENLIMRPDQMYGN | |
| | VVVTSIGQLVLYNARPEDAGLYTCTARNAAGLLR | |
| | ADFPLSVVQREPARDAAPSIPAPAECLPDVQACTG | |
| | PTSPHLVLWHYDPQRGGCMTFPARGCDGAARGF | |
| | ETYEACQQACARGPGDACVLPAVQGPCRGWEPR | |
| | WAYSPLLQQCHPFVYGGCEGNGNNFHSRESCED | |
| | ACPVPRTPPCRACRLRSKLALSLCRSDFAIVGRLT | |
| | EVLEEPEAAGGIARVALEDVLKDDKMGLKFLGTK | |
| | YLEVTLSGMDWACPCPNMTAGDGPLVIMGEVRD | |
| | GVAVLDAGSYVRAASEKRVKKILELLEKQACELL | |
| | NRFQD | |
| GASP, | SVVQREPARDAAPSIPAPAECLPDVQACTGPTSPH | 197 |
| residue | LVLWHYDPQRGGCMTFPARGCDGAARGFETYEA | |
| 279-548 of | CQQACARGPGDACVLPAVQGPCRGWEPRWAYSP | |
| NP_444514.1 | LLQQCHPFVYGGCEGNGNNFHSRESCEDACPVPR | |
| | TPPCRACRLRSKLALSLCRSDFAIVGRLTEVLEEPE | |
| | AAGGIARVALEDVLKDDKMGLKFLGTKYLEVTL | |
| | SGMDWACPCPNMTAGDGPLVIMGEVRDGVAVL | |
| | DAGSYVRAASEKRVKKILELLEKQACELLNRFQD | |
| GASP, | AGLLPGLGSHPGVCPNQLSPNLWVDAQSTCEREC | 198 |
| residue | SRDQDCAAAEKCCINVCGLHSCVAARFPGSPAAP | |
| 20-548 of | TTAASCEGFVCPQQGSDCDIWDGQPVCRCRDRCE | |
| NP_444514.1 | KEPSFTCASDGLTYYNRCYMDAEACLRGLHLHIV | |
| | PCKHVLSWPPSSPGPPETTARPTPGAAPVPPALYS | |
| | SPSPQAVQVGGTASLHCDVSGRPPPAVTWEKQSH | |
| | QRENLIMRPDQMYGNVVVTSIGQLVLYNARPED | |
| | AGLYTCTARNAAGLLRADFPLSVVQREPARDAAP | |
| | SIPAPAECLPDVQACTGPTSPHLVLWHYDPQRGG | |
| | CMTFPARGCDGAARGFETYEACQQACARGPGDA | |
| | CVLPAVQGPCRGWEPRWAYSPLLQQCHPFVYGG | |
| | CEGNGNNFHSRESCEDACPVPRTPPCRACRLRSKL | |
| | ALSLCRSDFAIVGRLTEVLEEPEAAGGIARVALED | |
| | VLKDDKMGLKFLGTKYLEVTLSGMDWACPCPN | |
| | MTAGDGPLVIMGEVRDGVAVLDAGSYVRAASEK | |
| | RVKKILELLEKQACELLNRFQD | |
| GASP, | DACVLPAVQGPCRGWEPRWAYSPLLQQCHPFVY | 199 |
| residue | GGCEGNGNNFHSRESCEDACPVPRTPPCRACRLR | |
| 357-548 of | SKLALSLCRSDFAIVGRLTEVLEEPEAAGGIARVA | |
| NP_444514.1 | LEDVLKDDKMGLKFLGTKYLEVTLSGMDWACPC | |
| | PNMTAGDGPLVIMGEVRDGVAVLDAGSYVRAAS | |
| | EKRVKKILELLEKQACELLNRFQD | |
| GASP, | VPRTPPCRACRLRSKLALSLCRSDFAIVGRLTEVL | 200 |
| residue | EEPEAAGGIARVALEDVLKDDKMGLKFLGTKYLE | |
| 411-548 of | VTLSGMDWACPCPNMTAGDGPLVIMGEVRDGV | |
| NP_444514.1 | AVLDAGSYVRAASEKRVKKILELLEKQACELLNR | |
| | FQD | |

[0087] Some recombinant proteins may be coexpressed with perlecan. Such recombinant proteins may include, but are not limited to GDF-8. Studies by Sengle et al (Sengle et al., 2011. J Biol Chem. 286(7):5087-99, the contents of which are herein incorporated by reference in their entirety) found that the GDF-8 prodomain associates with perlecan. Further studies indicate that perlecan knockout leads to muscular hypertrophy, suggesting that the interaction between GDF-8 and perlecan may contribute to GDF-8 activity (Xu et al. 2010. Matrix Biol. 29(6):461-70). In some cases, recombinant proteins may comprise one or more of the perlecan sequences presented in Table 12. In some cases, these sequences are expressed in association with N- and/or C-terminal secretion signal sequences [e.g. human Ig kappa chains with amino acid sequence MDMRVPAQLLGLLLLWFSGVLG (SEQ ID NO: 99)], flag tag sequences [e.g. DYKDDDDK (SEQ ID NO: 100)], one or more 3C protease cleavage site [e.g. LEVLFQGP (SEQ ID NO: 101)], one or more biotinylation site and/or His-tag sequences [e.g. HHHHHH (SEQ ID NO: 102)].

TABLE 12
Perlecan sequences

| | | SEQ |
|---|---|---|
| | | ID |
| Protein | Sequence | NO |
| Perlecan, | MGWRAAGALLLALLLHGRLLAVTHGLRAYDGLSLPEDIETVTA | 201 |
| NP_001278789.1 | SQMRWTHSYLSDDEDMLADSISGDDLGSGDLGSGDFQMVYFR | |
| | ALVNFTRSIEYSPQLEDAGSREFREVSEAVVDTLESEYLKIPGDQ | |
| | VVSVVFIKELDGWVFVELDVGSEGNADGAQIQEMLLRVISSGSV | |
| | ASYVTSPQGFQFRRLGTVPQFPRACTEAEFACHSYNECVALEYR | |
| | CDRRPDCRDMSDELNCEEPVLGISPTFSLLVETTSLPPRPETTIMR | |
| | QPPVTHAPQPLLPGSVRPLPCGPQEAACRNGHCIPRDYLCDGQE | |
| | DCEDGSDELDCGPPPPCEPNEFPCGNGHCALKLWRCDGDFDCE | |
| | DRTDEANCPTKRPEEVCGPTQFRCVSTNMCIPASFHCDEESDCP | |
| | DRSDEFGCMPPQVVTPPRESIQASRGQTVTFTCVAIGVPTPIINW | |
| | RLNWGHIPSHPRVTVTSEGGRGTLIIRDVKESDQGAYTCEAMNA | |
| | RGMVFGIPDGVLELVPQRAGPCPDGHFYLEHSAACLPCFCFGITS | |
| | VCQSTRRFRDQIRLRFDQPDDFKGVNVTMPAQPGTPPLSSTQLQI | |
| | DPSLHEFQLVDLSRRFLVHDSFWALPEQFLGNKVDSYGGSLRYN | |
| | VRYELARGMLEPVQRPDVVLMGAGYRLLSRGHTPTQPGALNQ | |
| | RQVQFSEEHWVHESGRPVQRAELLQVLQSLEAVLIQTVYNTKM | |
| | ASVGLSDIAMDTTVTHATSHGRAHSVEECRCPIGYSGLSCESCD | |
| | AHFTRVPGGPYLGTCSGCNCNGHASSCDPVYGHCLNCQHNTEG | |
| | PQCNKCKAGFFGDAMKATATSCRPCPCPYIDASRRFSDTCFLDT | |
| | DGQATCDACAPGYTGRRCESCAPGYEGNPIQPGGKCRPVNQEIV | |
| | RCDERGSMGTSGEACRCKNNVVGRLCNECADGSFHLSTRNPDG | |
| | CLKCFCMGVSRHCTSSSWSRAQLHGASEEPGHFSLTNAASTHTT | |
| | NEGIFSPTPGELGFSSFHRLLSGPYFWSLPSRFLGDKVTSYGGELR | |
| | FTVTQRSQPGSTPLHGQPLVVLQGNNIILEHHVAQEPSPGQPSTFI | |
| | VPFREQAWQRPDGQPATREHLLMALAGIDTLLIRASYAQQPAES | |
| | RVSGISMDVAVPEETGQDPALEVEQCSCPPGYRGPSCQDCDTGY | |
| | TRTPSGLYLGTCERCSCHGHSEACEPETGACQGCQHHTEGPRCE | |
| | QCQPGYYGDAQRGTPQDCQLCPCYGDPAAGQAAHTCFLDTDG | |
| | HPTCDACSPGHSGRHCERCAPGYYGNPSQGQPCQRDSQVPGPIG | |
| | CNCDPQGSVSSQCDAAGQCQCKAQVEGLTCSHCRPHHFHLSAS | |
| | NPDGCLPCFCMGITQQCASSAYTRHLISTHFAPGDFQGFALVNP | |
| | QRNSRLTGEFTVEPVPEGAQLSFGNFAQLGHESFYWQLPETYQG | |
| | DKVAAYGGKLRYTLSYTAGPQGSPLSDPDVQITGNNIMLVASQP | |
| | ALQGPERRSYEIMFREEFWRRPDGQPATREHLLMALADLDELLI | |
| | RATFSSVPLAASISAVSLEVAQPGPSNRPRALEVEECRCPPGYIGL | |
| | SCQDCAPGYTRTGSGLYLGHCELCECNGHSDLCHPETGACSQC | |
| | QHNAAGEFCELCAPGYYGDATAGTPEDCQPCACPLTNPENMFS | |
| | RTCESLGAGGYRCTACEPGYTGQYCEQCGPGYVGNPSVQGGQC | |
| | LPETNQAPLVVEVHPARSIVPQGGSHSLRCQVSGSPPHYFYWSR | |
| | EDGRPVPSGTQQRHQGSELHFPSVQPSDAGVYICTCRNLHQSNT | |
| | SRAELLVTEAPSKPITVTVEEQRSQSVRPGADVTFICTAKSKSPA | |
| | YTLVWTRLHNGKLPTRAMDFNGILTIRNVQLSDAGTYVCTGSN | |
| | MFAMDQGTATLHVQASGTLSAPVVSIHPPQLTVQPGQLAEFRCS | |
| | ATGSPTPTLEWTGGPGGQLPAKAQIHGGILRLPAVEPTDQAQYL | |
| | CRAHSSAGQQVARAVLHVHGGGGPRVQVSPERTQVHAGRTVR | |
| | LYCRAAGVPSATITWRKEGGSLPPQARSERTDIATLLIPAITTAD | |
| | AGFYLCVATSPAGTAQARIQVVVLSASDASPPPVKIESSSPSVTE | |
| | GQTLDLNCVVAGSAHAQVTWYRRGGSLPPHTQVHGSRLRLPQ | |
| | VSPADSGEYVCRVENGSGPKEASITVSVLHGTHSGPSYTPVPGST | |
| | RPIRIEPSSSHVAEGQTLDLNCVVPGQAHAQVTWHKRGGSLPAR | |
| | HQTHGSLLRLHQVTPADSGEYVCHVVGTSGPLEASVLVTIEASV | |
| | IPGPIPPVRIESSSSTVAEGQTLDLSCVVAGQAHAQVTWYKRGGS | |
| | LPARHQVRGSRLYIFQASPADAGQYVCRASNGMEASITVTVTGT | |
| | QGANLAYPAGSTQPIRIEPSSSQVAEGQTLDLNCVVPGQSHAQV | |
| | TWHKRGGSLPVRHQTHGSLLRLYQASPADSGEYVCRVLGSSVP | |
| | LEASVLVTIEPAGSVPALGVTPTVRIESSSSQVAEGQTLDLNCLV | |
| | AGQAHAQVTWHKRGGSLPARHQVHGSRLRLLQVTPADSGEYV | |
| | CRVVGSSGTQEASVLVTIQQRLSGSHSQGVAYPVRIESSSASLAN | |
| | GHTLDLNCLVASQAPHTITWYKRGGSLPSRHQIVGSRLRIPQVTP | |
| | ADSGEYVCHVSNGAGSRETSLIVTIQGSGSSHVPSVSPPIRIESSSP | |
| | TVVEGQTLDLNCVVARQPQAIITWYKRGGSLPSRHQTHGSHLRL | |
| | HQMSVADSGEYVCRANNNIDALEASIVISVSPSAGSPSAPGSSMP | |
| | IRIESSSSHVAEGETLDLNCVVPGQAHAQVTWHKRGGSLPSHHQ | |
| | TRGSRLRLHHVSPADSGEYVCRVMGSSGPLEASVLVTIEASGSS | |
| | AVHVPAPGGAPPIRIEPSSSRVAEGQTLDLKCVVPGQAHAQVTW | |
| | HKRGGNLPARHQVHGPLLRLNQVSPADSGEYSCQVTGSSGTLE | |
| | ASVLVTIEPSSPGPIPAPGLAQPIYIEASSSHVTEGQTLDLNCVVPG | |
| | QAHAQVTWYKRGGSLPARHQTHGSQLRLHLVSPADSGEYVCR | |
| | AASGPGPEQEASFTVTVPPSEGSSYRLRSPVISIDPPSSTVQQGQD | |
| | ASFKCLIHDGAAPISLEWKTRNQELEDNVHISPNGSIITIVGTRPS | |
| | NHGTYRCVASNAYGVAQSVVNLSVHGPPTVSVLPEGPVWVKV | |
| | GKAVTLECVSAGEPRSSARWTRISSTPAKLEQRTYGLMDSHAVL | |
| | QISSAKPSDAGTYVCLAQNALGTAQKQVEVIVDTGAMAPGAPQ | |
| | VQAEEAELTVEAGHTATLRCSATGSPAPTIHWSKLRSPLPWQHR | |
| | LEGDTLIIPRVAQQDSGQYICNATSPAGHAEATIILHVESPPYATT | |
| | VPEHASVQAGETVQLQCLAHGTPPLTFQWSRVGSSLPGRATAR | |
| | NELLHFERAAPEDSGRYRCRVTNKVGSAEAFAQLLVQGPPGSLP | |
| | ATSIPAGSTPTVQVTPQLETKSIGASVEFHCAVPSDRGTQLRWFK | |
| | EGGQLPPGHSVQDGVLRIQNLDQSCQGTYICQAHGPWGKAQAS | |
| | AQLVIQALPSVLINIRTSVQTVVVGHAVEFECLALGDPKPQVTW | |
| | SKVGGHLRPGIVQSGGVVRIAHVELADAGQYRCTATNAAGTTQ | |
| | SHVLLLVQALPQISMPQEVRVPAGSAAVFPCIASGYPTPDISWSK | |
| | LDGSLPPDSRLENNMLMLPSVRPQDAGTYVCTATNRQGKVKAF | |
| | AHLQVPERVVPYFTQTPYSFLPLPTIKDAYRKFEIKITFRPDSADG | |
| | MLLYNGQKRVPGSPTNLANRQPDFISFGLVGGRPEFRFDAGSGM | |
| | ATIRHPTPLALGHFHTVTLLRSLTQGSLIVGDLAPVNGTSQGKFQ | |
| | GLDLNEELYLGGYPDYGAIPKAGLSSGFIGCVRELRIQGEEIVFH | |
| | DLNLTAHGISHCPTCRDRPCQNGGQCHDSESSSYVCVCPAGFTG | |
| | SRCEHSQALHCHPEACGPDATCVNRPDGRGYTCRCHLGRSGLR | |
| | CEEGVTVTTPSLSGAGSYLALPALTNTHHELRLDVEFKPLAPDG | |
| | VLLFSGGKSGPVEDFVSLAMVGGHLEFRYELGSGLAVLRSAEPL | |
| | ALGRWHRVSAERLNKDGSLRVNGGRPVLRSSPGKSQGLNLHTL | |
| | LYLGGVEPSVPLSPATNMSAHFRGCVGEVSVNGKRLDLTYSFLG | |
| | SQGIGQCYDSSPCERQPCQHGATCMPAGEYEFQCLCRDGFKGD | |
| | LCEHEENPCQLREPCLHGGTCQGTRCLCLPGFSGPRCQQGSGHG | |
| | IAESDWHLEGSGGNDAPGQYGAYFHDDGFLAFPGHVFSRSLPEV | |
| | PETIELEVRTSTASGLLLWQGVEVGEAGQGKDFISLGLQDGHLV | |
| | FRYQLGSGEARLVSEDPINDGEWHRVTALREGRRGSIQVDGEEL | |
| | VSGRSPGPNVAVNAKGSVYIGGAPDVATLTGGRFSSGITGCVKN | |
| | LVLHSARPGAPPPQPLDLQHRAQAGANTRPCPS | |
| Perlecan, | AFAHLQVPERVVPYFTQTPYSFLPLPTIKDAYRKFEIKITFRPDSA | 202 |
| residues | DGMLLYNGQKRVPGSPTNLANRQPDFISFGLVGGRPEFRFDAGS | |
| 3653-4392 | GMATIRHPTPLALGHFHTVTLLRSLTQGSLIVGDLAPVNGTSQG | |
| of | KFQGLDLNEELYLGGYPDYGAIPKAGLSSGFIGCVRELRIQGEEI | |
| NP_001278789.1 | VFHDLNLTAHGISHCPTCRDRPCQNGGQCHDSESSSYVCVCPAG | |
| | FTGSRCEHSQALHCHPEACGPDATCVNRPDGRGYTCRCHLGRS | |
| | GLRCEEGVTVTTPSLSGAGSYLALPALTNTHHELRLDVEFKPLA | |
| | PDGVLLFSGGKSGPVEDFVSLAMVGGHLEFRYELGSGLAVLRSA | |
| | EPLALGRWHRVSAERLNKDGSLRVNGGRPVLRSSPGKSQGLNL | |
| | HTLLYLGGVEPSVPLSPATNMSAHFRGCVGEVSVNGKRLDLTYS | |
| | FLGSQGIGQCYDSSPCERQPCQHGATCMPAGEYEFQCLCRDGFK | |
| | GDLCEHEENPCQLREPCLHGGTCQGTRCLCLPGFSGPRCQQGSG | |
| | HGIAESDWHLEGSGGNDAPGQYGAYFHDDGFLAFPGHVFSRSL | |
| | PEVPETIELEVRTSTASGLLLWQGVEVGEAGQGKDFISLGLQDG | |
| | HLVFRYQLGSGEARLVSEDPINDGEWHRVTALREGRRGSIQVDG | |
| | EELVSGRSPGPNVAVNAKGSVYIGGAPDVATLTGGRFSSGITGC | |
| | VKNLVLHSARPGAPPPQPLDLQHRAQAGANTRPCPS | |

[0088] In some cases, recombinant proteins of the invention may be coexpressed with follistatin and/or FLRG. Such recombinant proteins may include, but are not limited to GDF-8. Both follistatin and FLRG are known to antagonize some TGF-β family member proteins, including, but not limited to GDF-8 (Lee, S-J. et al., 2010. Mol Endocrinol. 24(10):1998-2008, Takehara-Kasamatsu, Y. et al., 2007. J Med Invest. 54(3-4):276-88, the contents of each of which are herein incorporated by reference in their entirety). Follistatin has been shown to block GDF-8 activity by binding to the free growth factor and preventing receptor binding. Both follistatin and FLRG are implicated in modulating growth factor activity during development.

[0089] In some embodiments, recombinant proteins of the invention may be coexpressed with decorin. Such recombinant proteins may include, but are not limited to TGF-β and GDF-8. Decorin is a known antagonist of TGF-β activity (Zhu, J. et al., 2007. J Biol Chem. 282:25852-63, the contents of which are herein incorporated by reference in their entirety) and may also antagonize other TGF-β family members, including, but not limited to GDF-8. Decorin-dependent inhibition of TGF-β and GDF-8 activity has been shown to reduce fibrosis in various tissues. Decorin expression has also been shown to increase the expression of follistatin, a known inhibitor of free GDF-8.

[0090] In some embodiments, recombinant proteins of the present invention may comprise those depicted in FIG. 7. Some recombinant proteins of the present invention may comprise one or more features and/or combinations of protein modules from the embodiments depicted in FIG. 7.

### Recombinant Growth Differentiation Factors (GDFs), Activins and Inhibins

[0091] Growth differentiation factors (GDFs), activins and inhibins are TGF-β family member proteins involved in a number of cellular and/or developmental activities. In some embodiments of the present invention, recombinant proteins may comprise one or more protein modules from one or more GDFs, activins and/or inhibins. In further embodiments, GDF protein modules may comprise GDF-8 and/or GDF-11 protein modules.

[0092] GDF-8 and GDF-11, which are secreted as latent complexes (Sengle et al., 2011. J Biol Chem. 286(7):5087-99; Ge et al., 2005. Mol Cel Biol. 25(14):5846-58), show conservation of the fastener residues (Lys 27 and Tyr 75 of TGF-β1; see FIG. 8). GDF-8 (also referred to herein as myostatin) is involved in regulating muscle mass, and its deficiency increases muscle mass in multiple species, including humans (Rodino-Klapac, L. R. et al., 2009. Muscle Nerve. 39(3):283-96). GDF-8 may be found in the circulation in latent form, but may also be stored in the extracellular matrix, bound to LTBP3 (Anderson et al., 2007. J Biol Chem. 283(11):7027-35) or perlecan (Sengle et al., 2011. J Biol Chem. 286(7):5087-99). While complexed with its prodomain, GDF-8 is unable to participate in receptor binding with the type II receptor, ActRIIB (Sengle et al., 2008. J Mol Biol. 381(4):1025-39). While GDF-8 is expressed primarily in muscle, GDF-11 expression is more systemic and its activity is thought to be involved in multiple processes (Lee et al., 2013. PNAS. 110(39):E3713-22). It is believed to be involved in development of multiple tissues, including, but not limited to the retina, kidney, pancreas and olfactory system. It is also believed to be a circulating factor in the blood (Sinha, M. et al., 2014. Science. 344(6184):649-52 and Katsimpardi, L. et al., 2014. Science. 344(6184):630-4, the contents of each of which are herein incorporated by reference in their entirety).

[0093] GDF-8 and GDF-11 also share considerable homology. While the prodomains only share 48% homology, GDF-8 and GDF-11 growth factor domains share 90% homology (60% homology when prodomains and growth factors are taken together).

[0094] Release of GDF-8 and GDF-11 from latent GPCs requires cleavage of the prodomains at the BMP/tolloid cleavage site (located between Arg 75 and Asp 76 in GDF-8 and between Gly 97 and Asp 98 in GDF-11) by BMP1/tolloid metalloproteinases. This cleavage is between the α2 helix and the fastener. Thus at least two different methods of unfastening the straitjacket, force and proteolysis, can release family members from latency.

[0095] In some embodiments, recombinant proteins of the present invention comprising GDFs may comprise sequences listed in Table 13 or fragments thereof. In some cases, these sequences are expressed in association with N- and/or C-terminal secretion signal sequences [e.g. human Ig kappa chains with amino acid sequence MDMRVPAQLLGLLLLWFSGVLG (SEQ ID NO: 99)], flag tag sequences [e.g. DYKDDDDK (SEQ ID NO: 100)], one or more 3C protease cleavage site [e.g. LEVLFQGP (SEQ ID NO: 101)], one or more biotinylation site and/or His-tag sequences [e.g. HHHHHH (SEQ ID NO: 102)].

TABLE 13
Recombinant GDFs

| | | SEQ |
|---|---|---|
| | | ID |
| Protein | Sequence | NO |
| proGDF-8 | NENSEQKENVEKEGLCNACTWRQNTKSSRIEAIKIQILSKLRLE | 5 |
| | TAPNISKDVIRQLLPKAPPLRELIDQYDVQRDDSSDGSLEDDDY | |
| | HATTETIITMPTESDFLMQVDGKPKCCFFKFSSKIQYNKVVKA | |
| | QLWIYLRPVETPTTVFVQILRLIKPMKDGTRYTGIRSLKLDMNP | |
| | GTGIWQSIDVKTVLQNWLKQPESNLGIEIKALDENGHDLAVTF | |
| | PGPGEDGLNPFLEVKVTDTPKRSRRDFGLDCDEHSTESRCCRY | |
| | PLTVDFEAFGWDWIIAPKRYKANYCSGECEFVFLQKYPHTHL | |
| | VHQANPRGSAGPCCTPTKMSPINMLYFNGKEQIIYGKIPAMVV | |
| | DRCGCS | |
| GDF-8 prodomain | NENSEQKENVEKEGLCNACTWRQNTKSSRIEAIKIQILSKLRLE | 71 |
| | TAPNISKDVIRQLLPKAPPLRELIDQYDVQRDDSSDGSLEDDDY | |
| | HATTETIITMPTESDFLMQVDGKPKCCFFKFSSKIQYNKVVKA | |
| | QLWIYLRPVETPTTVFVQILRLIKPMKDGTRYTGIRSLKLDMNP | |
| | GTGIWQSIDVKTVLQNWLKQPESNLGIEIKALDENGHDLAVTF | |
| | PGPGEDGLNPFLEVKVTDTPKRSRR | |
| GDF-8 prodomain | NENSEQKENVEKEGLCNACTWRQNTKSSRIEAIKIQILSKLRLE | 203 |
| D76A | TAPNISKDVIRQLLPKAPPLRELIDQYDVQRADSSDGSLEDDDY | |
| | HATTETIITMPTESDFLMQVDGKPKCCFFKFSSKIQYNKVVKA | |
| | QLWIYLRPVETPTTVFVQILRLIKPMKDGTRYTGIRSLKLDMNP | |
| | GTGIWQSIDVKTVLQNWLKQPESNLGIEIKALDENGHDLAVTF | |
| | PGPGEDGLNPFLEVKVTDTPKRSRR | |
| proGDF-8 AXXA | NENSEQKENVEKEGLCNACTWRQNTKSSRIEAIKIQILSKLRLE | 204 |
| | TAPNISKDVIRQLLPKAPPLRELIDQYDVQRDDSSDGSLEDDDY | |
| | HATTETIITMPTESDFLMQVDGKPKCCFFKFSSKIQYNKVVKA | |
| | QLWIYLRPVETPTTVFVQILRLIKPMKDGTRYTGIRSLKLDMNP | |
| | GTGIWQSIDVKTVLQNWLKQPESNLGIEIKALDENGHDLAVTF | |
| | PGPGEDGLNPFLEVKVTDTPKASRADFGLDCDEHSTESRCCRY | |
| | PLTVDFEAFGWDWIIAPKRYKANYCSGECEFVFLQKYPHTHL | |
| | VHQANPRGSAGPCCTPTKMSPINMLYFNGKEQIIYGKIPAMVV | |
| | DRCGCS | |
| proGDF-8 D76A | NENSEQKENVEKEGLCNACTWRQNTKSSRIEAIKIQILSKLRLE | 205 |
| | TAPNISKDVIRQLLPKAPPLRELIDQYDVQRADSSDGSLEDDDY | |
| | HATTETIITMPTESDFLMQVDGKPKCCFFKFSSKIQYNKVVKA | |
| | QLWIYLRPVETPTTVFVQILRLIKPMKDGTRYTGIRSLKLDMNP | |
| | GTGIWQSIDVKTVLQNWLKQPESNLGIEIKALDENGHDLAVTF | |
| | PGPGEDGLNPFLEVKVTDTPKRSRRDFGLDCDEHSTESRCCRY | |
| | PLTVDFEAFGWDWIIAPKRYKANYCSGECEFVFLQKYPHTHL | |
| | VHQANPRGSAGPCCTPTKMSPINMLYFNGKEQIIYGKIPAMVV | |
| | DRCGCS | |
| proGDF-8 AXXA | NENSEQKENVEKEGLCNACTWRQNTKSSRIEAIKIQILSKLRLE | 206 |
| D76A | TAPNISKDVIRQLLPKAPPLRELIDQYDVQRADSSDGSLEDDDY | |
| | HATTETIITMPTESDFLMQVDGKPKCCFFKFSSKIQYNKVVKA | |
| | QLWIYLRPVETPTTVFVQILRLIKPMKDGTRYTGIRSLKLDMNP | |
| | GTGIWQSIDVKTVLQNWLKQPESNLGIEIKALDENGHDLAVTF | |
| | PGPGEDGLNPFLEVKVTDTPKASRADFGLDCDEHSTESRCCRY | |
| | PLTVDFEAFGWDWIIAPKRYKANYCSGECEFVFLQKYPHTHL | |
| | VHQANPRGSAGPCCTPTKMSPINMLYFNGKEQIIYGKIPAMVV | |
| | DRCGCS | |
| proGDF-11 | AEGPAAAAAAAAAAAAAGVGGERSSRPAPSVAPEPDGCPVC | 4 |
| | VWRQHSRELRLESIKSQILSKLRLKEAPNISREVVKQLLPKAPP | |
| | LQQILDLHDFQGDALQPEDFLEEDEYHATTETVISMAQETDPA | |
| | VQTDGSPLCCHFHFSPKVMFTKVLKAQLWVYLRPVPRPATVY | |
| | LQILRLKPLTGEGTAGGGGGGRRHIRIRSLKIELHSRSGHWQSI | |
| | DFKQVLHSWFRQPQSNWGIEINAFDPSGTDLAVTSLGPGAEGL | |
| | HPFMELRVLENTKRSRRNLGLDCDEHSSESRCCRYPLTVDFEA | |
| | FGWDWIIAPKRYKANYCSGQCEYMFMQKYPHTHLVQQANPR | |
| | GSAGPCCTPTKMSPINMLYFNDKQQIIYGKIPGMVVDRCGCS | |
| proGDF-11 D98A | AEGPAAAAAAAAAAAAAGVGGERSSRPAPSVAPEPDGCPVC | 207 |
| | VWRQHSRELRLESIKSQILSKLRLKEAPNISREVVKQLLPKAPP | |
| | LQQILDLHDFQGAALQPEDFLEEDEYHATTETVISMAQETDPA | |
| | VQTDGSPLCCHFHFSPKVMFTKVLKAQLWVYLRPVPRPATVY | |
| | LQILRLKPLTGEGTAGGGGGGRRHIRIRSLKIELHSRSGHWQSI | |
| | DFKQVLHSWFRQPQSNWGIEINAFDPSGTDLAVTSLGPGAEGL | |
| | HPFMELRVLENTKRSRRNLGLDCDEHSSESRCCRYPLTVDFEA | |
| | FGWDWIIAPKRYKANYCSGQCEYMFMQKYPHTHLVQQANPR | |
| | GSAGPCCTPTKMSPINMLYFNDKQQIIYGKIPGMVVDRCGCS | |
| proGDF-11 D2G | AEGPAAAAAAAAAAAAAGVGGERSSRPAPSVAPEPDGCPVC | 208 |
| | VWRQHSRELRLESIKSQILSKLRLKEAPNISREVVKQLLPKAPP | |
| | LQQILDLHDFQGDALQPEDFLEEDEYHATTETVISMAQETDPA | |
| | VQTDGSPLCCHFHFSPKVMFTKVLKAQLWVYLRPVPRPATVY | |
| | LQILRLKPLTGEGTAGGGGGGRRHIRIRSLKIELHSRSGHWQSI | |
| | DFKQVLHSWFRQPQSNWGIEINAFDPSGTDLAVTSLGPGAEGL | |
| | HPFMELRVLENTKRSGNLGLDCDEHSSESRCCRYPLTVDFEAF | |
| | GWDWIIAPKRYKANYCSGQCEYMFMQKYPHTHLVQQANPRG | |
| | SAGPCCTPTKMSPINMLYFNDKQQIIYGKIPGMVVDRCGCS | |
| proGDF-11 AxxA | AEGPAAAAAAAAAAAAAGVGGERSSRPAPSVAPEPDGCPVC | 209 |
| | VWRQHSRELRLESIKSQILSKLRLKEAPNISREVVKQLLPKAPP | |
| | LQQILDLHDFQGDALQPEDFLEEDEYHATTETVISMAQETDPA | |
| | VQTDGSPLCCHFHFSPKVMFTKVLKAQLWVYLRPVPRPATVY | |
| | LQILRLKPLTGEGTAGGGGGGRRHIRIRSLKIELHSRSGHWQSI | |
| | DFKQVLHSWFRQPQSNWGIEINAFDPSGTDLAVTSLGPGAEGL | |
| | HPFMELRVLENTKASRANLGLDCDEHSSESRCCRYPLTVDFEA | |
| | FGWDWIIAPKRYKANYCSGQCEYMFMQKYPHTHLVQQANPR | |
| | GSAGPCCTPTKMSPINMLYFNDKQQIIYGKIPGMVVDRCGCS | |
| proGDF-11 AxxA | AEGPAAAAAAAAAAAAAGVGGERSSRPAPSVAPEPDGCPVC | 210 |
| D98A | VWRQHSRELRLESIKSQILSKLRLKEAPNISREVVKQLLPKAPP | |
| | LQQILDLHDFQGAALQPEDFLEEDEYHATTETVISMAQETDPA | |
| | VQTDGSPLCCHFHFSPKVMFTKVLKAQLWVYLRPVPRPATVY | |
| | LQILRLKPLTGEGTAGGGGGGRRHIRIRSLKIELHSRSGHWQSI | |
| | DFKQVLHSWFRQPQSNWGIEINAFDPSGTDLAVTSLGPGAEGL | |
| | HPFMELRVLENTKASRANLGLDCDEHSSESRCCRYPLTVDFEA | |
| | FGWDWIIAPKRYKANYCSGQCEYMFMQKYPHTHLVQQANPR | |
| | GSAGPCCTPTKMSPINMLYFNDKQQIIYGKIPGMVVDRCGCS | |
| GDF-11 | AEGPAAAAAAAAAAAAAGVGGERSSRPAPSVAPEPDGCPVC | 211 |
| prodomain D98A | VWRQHSRELRLESIKSQILSKLRLKEAPNISREVVKQLLPKAPP | |
| | LQQILDLHDFQGAALQPEDFLEEDEYHATTETVISMAQETDPA | |
| | VQTDGSPLCCHFHFSPKVMFTKVLKAQLWVYLRPVPRPATVY | |
| | LQILRLKPLTGEGTAGGGGGGRRHIRIRSLKIELHSRSGHWQSI | |
| | DFKQVLHSWFRQPQSNWGIEINAFDPSGTDLAVTSLGPGAEGL | |
| | HPFMELRVLENTKRSRR | |
| GDF-11 | AEGPAAAAAAAAAAAAAGVGGERSSRPAPSVAPEPDGCPVC | 72 |
| prodomain | VWRQHSRELRLESIKSQILSKLRLKEAPNISREVVKQLLPKAPP | |
| | LQQILDLHDFQGDALQPEDFLEEDEYHATTETVISMAQETDPA | |
| | VQTDGSPLCCHFHFSPKVMFTKVLKAQLWVYLRPVPRPATVY | |
| | LQILRLKPLTGEGTAGGGGGGRRHIRIRSLKIELHSRSGHWQSI | |
| | DFKQVLHSWFRQPQSNWGIEINAFDPSGTDLAVTSLGPGAEGL | |
| | HPFMELRVLENTKRSRR | |

[0096] Activins and inhibins are TGF-β family member proteins, the activity of each of which often results in opposing functions (Bilezikjian et al 2012). Like other family members, these proteins occur physiologically as dimers. Activins and inhibins are constructed in part from the same β-subunits, that may include inhibin-beta A, inhibin-beta B, inhibin-beta C and inhibin-beta E (referred to herein as β-subunit A, B, C and E, respectively). The difference between activins and inhibins, structurally, is that activins are β-subunit dimers while inhibins are heterodimers, wherein the second subunit is inhibin-α. Activins are named for their subunit pairs, such that activin A comprises a homodimer of two A subunits, activin AB comprises a dimer of A and B subunits, B comprises a dimer of B subunits, etc. (Muenster et al 2011). Activins are involved in a variety of functions that may include, but are not limited to cell growth, differentiation, programmed cell death, endocrine functions, cellular metabolism, bone growth, etc. They are especially recognized for their control of reproductive hormone cycles. Activin and inhibin signaling often functions antagonistically in this regard.

[0097] In some embodiments, recombinant proteins of the present invention may comprise integrins. Integrins are cell surface heterodimers formed by alpha and beta subunits, each of which has a transmembrane domain and in the N-terminal portion of the extracellular domain come together to form the ligand binding site. Recombinant proteins of the present invention may comprise integrins and/or integrin subunits. Such integrins and/or integrin subunits may comprise any of those disclosed in International Patent Application No. WO2014074532, the contents of which are herein incorporated by reference in their entirety.

[0098] Recombinant proteins of the invention may include intercellular adhesion molecule 1 (ICAM-1). In some cases, ICAM-1 proteins of the present invention may be used as control proteins during antibody development and/or antibody testing. In some cases, the ectodomain of ICAM-1 (Ig-like domains 1-5, without the transmembrane domain and cytoplasmic tail) may be used. In some cases, ICAM-1 may be used as a control during selection of binding molecules using phage display technologies. In some cases, ICAM-1 proteins of the invention comprise one or more detectable label. Detectable labels may include, for example, histidine tags.

### Chimeric Proteins

[0099] In some embodiments, recombinant proteins of the present invention may comprise chimeric proteins. As used herein, the term “chimeric protein” refers to a protein comprising one or more protein modules from at least two different proteins [formed from the same gene (e.g. variants arising from alternative splicing) or from different genes]. Chimeric proteins may comprise protein modules from two or more TGF-β family member proteins. Such chimeric proteins may comprise protein modules from TGF-β1, TGF-β2 and/or TGF-β3. Some chimeric proteins of the present invention may comprise protein modules including, but not limited to the protein modules and/or amino acid sequences listed in Table 14 (residue numbers correspond to the pro-protein sequences listed in Table 1). Some chimeric proteins of the present invention may comprise protein modules comprising amino acid sequences similar to those in Table 14, but comprising additional or fewer amino acids than those listed. Such modules may comprise about 1 more or fewer amino acids, about 2 more or fewer amino acids, about 3 more or fewer amino acids, about 4 more or fewer amino acids, about 5 more or fewer amino acids, about 6 more or fewer amino acids, about 7 more or fewer amino acids, about 8 more or fewer amino acids, about 9 more or fewer amino acids, about 10 more or fewer amino acids or greater than 10 more or fewer amino acids on N-terminal and/or C-terminal ends. In some cases, these sequences are expressed in association with N- and/or C-terminal secretion signal sequences [e.g. human Ig kappa chains with amino acid sequence MDMRVPAQLLGLLLLWFSGVLG (SEQ ID NO: 99)], flag tag sequences [e.g. DYKDDDDK (SEQ ID NO: 100)], one or more 3C protease cleavage site [e.g. LEVLFQGP (SEQ ID NO: 101)], one or more biotinylation site and/or His-tag sequences [e.g. HHHHHH (SEQ ID NO: 102)].

TABLE 14
Protein modules

| | | | SEQ |
|---|---|---|---|
| Protein | Residues | Sequence | ID NO |
| TGF-β1 | 1-45 | LSTSKTIDMELVKRKRIEAIRGQILSKLRLASPPSQGEV | 212 |
| C4S | | PPGPLP | |
| TGF-β1 | 1-47 | LSTSKTIDMELVKRKRIEAIRGQILSKLRLASPPSQGEV | 213 |
| C4S | | PPGPLPEA | |
| TGF-β1 | 1-56 | LSTSKTIDMELVKRKRIEAIRGQILSKLRLASPPSQGEV | 214 |
| C4S | | PPGPLPEAVLALYNSTR | |
| TGF-β1 | 1-57 | LSTSKTIDMELVKRKRIEAIRGQILSKLRLASPPSQ | 215 |
| C4S | | GEVPPGPLPEAVLALYNSTRD | |
| TGF-β1 | 1-74 | LSTCKTIDMELVKRKRIEAIRGQILSKLRLASPPSQGEV | 216 |
| | | PPGPLPEAVLALYNSTRDRVAGESAEPEPEPEADY | |
| TGF-β1 | 1-207 | LSTCKTIDMELVKRKRIEAIRGQILSKLRLASPPSQGEV | 217 |
| | | PPGPLPEAVLALYNSTRDRVAGESAEPEPEPEADYYA | |
| | | KEVTRVLMVETHNEIYDKFKQSTHSIYMFFNTSELRE | |
| | | AVPEPVLLSRAELRLLRLKLKVEQHVELYQKYSNNS | |
| | | WRYLSNRLLAPSDSPEWLSFDVTGVVRQWLSRGGEIE | |
| | | GFRLSAHCSCDSRDNTLQVDI | |
| TGF-β1 | 46-end | EAVLALYNSTRDRVAGESAEPEPEPEADYYAKEVTR | 218 |
| | | VLMVETHNEIYDKFKQSTHSIYMFFNTSELREAVPEP | |
| | | VLLSRAELRLLRLKLKVEQHVELYQKYSNNSWRYLS | |
| | | NRLLAPSDSPEWLSFDVTGVVRQWLSRGGEIEGFRLS | |
| | | AHCSCDSRDNTLQVDINGFTTGRRGDLATIHGMNRPF | |
| | | LLLMATPLERAQHLQSSRHRRALDTNYCFSSTEKNCC | |
| | | VRQLYIDFRKDLGWKWIHEPKGYHANFCLGPCPYIW | |
| | | SLDTQYSKVLALYNQHNPGASAAPCCVPQALEPLPIV | |
| | | YYVGRKPKVEQLSNMIVRSCKCS | |
| TGF-β1 | 47-end | AVLALYNSTRDRVAGESAEPEPEPEADYYAKEVTRV | 219 |
| | | LMVETHNEIYDKFKQSTHSIYMFFNTSELREAVPEPVL | |
| | | LSRAELRLLRLKLKVEQHVELYQKYSNNSWRYLSNR | |
| | | LLAPSDSPEWLSFDVTGVVRQWLSRGGEIEGFRLSAH | |
| | | CSCDSRDNTLQVDINGFTTGRRGDLATIHGMNRPFLL | |
| | | LMATPLERAQHLQSSRHRRALDTNYCFSSTEKNCCVR | |
| | | QLYIDFRKDLGWKWIHEPKGYHANFCLGPCPYIWSL | |
| | | DTQYSKVLALYNQHNPGASAAPCCVPQALEPLPIVYY | |
| | | VGRKPKVEQLSNMIVRSCKCS | |
| TGF-β1 | 49-201 | LALYNSTRDRVAGESAEPEPEPEADYYAKEVTRVLM | 220 |
| | | VETHNEIYDKFKQSTHSIYMFFNTSELREAVPEPVLLS | |
| | | RAELRLLRLKLKVEQHVELYQKYSNNSWRYLSNRLL | |
| | | APSDSPEWLSFDVTGVVRQWLSRGGEIEGFRLSAHCS | |
| | | CDSRDNTLQVDINGFTTGRRGDLATIHGMNRPFLLLM | |
| | | ATPLERAQHLQSSRHRR | |
| TGF-β1 | 57-201 | DRVAGESAEPEPEPEADYYAKEVTRVLMVETHNEIY | 221 |
| | | DKFKQSTHSIYMFFNTSELREAVPEPVLLSRAELRLLR | |
| | | LKLKVEQHVELYQKYSNNSWRYLSNRLLAPSDSPEW | |
| | | LSFDVTGVVRQWLSRGGEIEGFRLSAHCSCDSRDNTL | |
| | | QVDINGFTTGRRGDLATIHGMNRPFLLLMATPLERAQ | |
| | | HLQSSRHRR | |
| TGF-β1 | 58-201 | RVAGESAEPEPEPEADYYAKEVTRVLMVETHNEIYD | 222 |
| | | KFKQSTHSIYMFFNTSELREAVPEPVLLSRAELRLLRL | |
| | | KLKVEQHVELYQKYSNNSWRYLSNRLLAPSDSPEWL | |
| | | SFDVTGVVRQWLSRGGEIEGFRLSAHCSCDSRDNTLQ | |
| | | VDINGFTTGRRGDLATIHGMNRPFLLLMATPLERAQH | |
| | | LQSSRHRR | |
| TGF-β1 | 74-249 | YYAKEVTRVLMVETHNEIYDKFKQSTHSIYMFFNTSE | 223 |
| | | LREAVPEPVLLSRAELRLLRLKLKVEQHVELYQKYSN | |
| | | NSWRYLSNRLLAPSDSPEWLSFDVTGVVRQWLSRGG | |
| | | EIEGFRLSAHCSCDSRDNTLQVDINGFTTGRRGDLATI | |
| | | HGMNRPFLLLMATPLERAQHLQSSRHRR | |
| TGF-β1 | 74-end | YYAKEVTRVLMVETHNEIYDKFKQSTHSIYMFFNTSE | 224 |
| | | LREAVPEPVLLSRAELRLLRLKLKVEQHVELYQKYSN | |
| | | NSWRYLSNRLLAPSDSPEWLSFDVTGVVRQWLSRGG | |
| | | EIEGFRLSAHCSCDSRDNTLQVDINGFTTGRRGDLATI | |
| | | HGMNRPFLLLMATPLERAQHLQSSRHRRALDTNYCF | |
| | | SSTEKNCCVRQLYIDFRKDLGWKWIHEPKGYHANFC | |
| | | LGPCPYIWSLDTQYSKVLALYNQHNPGASAAPCCVP | |
| | | QALEPLPIVYYVGRKPKVEQLSNMIVRSCKCS | |
| TGF-β1 | 75-249 | YAKEVTRVLMVETHNEIYDKFKQSTHSIYMFFNTSEL | 225 |
| | | REAVPEPVLLSRAELRLLRLKLKVEQHVELYQKYSNN | |
| | | SWRYLSNRLLAPSDSPEWLSFDVTGVVRQWLSRGGEI | |
| | | EGFRLSAHCSCDSRDNTLQVDINGFTTGRRGDLATIH | |
| | | GMNRPFLLLMATPLERAQHLQSSRHRR | |
| TGF-β1 | 75-end | YAKEVTRVLMVETHNEIYDKFKQSTHSIYMFFNTSEL | 226 |
| | | REAVPEPVLLSRAELRLLRLKLKVEQHVELYQKYSNN | |
| | | SWRYLSNRLLAPSDSPEWLSFDVTGVVRQWLSRGGEI | |
| | | EGFRLSAHCSCDSRDNTLQVDINGFTTGRRGDLATIH | |
| | | GMNRPFLLLMATPLERAQHLQSSRHRRALDTNYCFSS | |
| | | TEKNCCVRQLYIDFRKDLGWKWIHEPKGYHANFCLG | |
| | | PCPYIWSLDTQYSKVLALYNQHNPGASAAPCCVPQA | |
| | | LEPLPIVYYVGRKPKVEQLSNMIVRSCKCS | |
| TGF-β1 | 228-361 | FLLLMATPLERAQHLQSSRHRRALDTNYCFSSTEKNC | 227 |
| | | CVRQLYIDFRKDLGWKWIHEPKGYHANFCLGPCPYI | |
| | | WSLDTQYSKVLALYNQHNPGASAAPCCVPQALEPLPI | |
| | | VYYVGRKPKVEQLSNMIVRSCKCS | |
| TGF-β1 | 250-361 | ALDTNYCFSSTEKNCCVRQLYIDFRKDLGWKWIHEP | 44 |
| | | KGYHANFCLGPCPYIWSLDTQYSKVLALYNQHNPGA | |
| | | SAAPCCVPQALEPLPIVYYVGRKPKVEQLSNMIVRSC | |
| | | KCS | |
| TGF-β2 | 1-48 | SLSTSSTLDMDQFMRKRIEAIRGQILSKLKLTSPPE | 228 |
| C5S | | DYPEPEEVPPEV | |
| TGF-β2 | 1-56 | SLSTSSTLDMDQFMRKRIEAIRGQILSKLKLTSPPE | 229 |
| C5S | | DYPEPEEVPPEVISIYNSTR | |
| TGF-β2 | 1-57 | SLSTSSTLDMDQFMRKRIEAIRGQILSKLKLTSPPE | 230 |
| C5S | | DYPEPEEVPPEVISIYNSTRD | |
| TGF-β2 | 232-260 | FAGIDGTSTYTSGDQKTIKSTRKKNSGKTP | 66 |
| TGF-β2 | 236-254 | GTSTYTSGDQKTIKSTRKK | 231 |
| TGF-β2 | 46-283 | PEVISIYNSTRDLLQEKASRRAAACERERSDEEYYAKE | 50 |
| | | VYKIDMPPFFPSENAIPPTFYRPYFRIVRFDVSAMEKN | |
| | | ASNLVKAEFRVFRLQNPKARVPEQRIELYQILKSKDLT | |
| | | SPTQRYIDSKVVKTRAEGEWLSFDVTDAVHEWLHHK | |
| | | DRNLGFKISLHCPCCTFVPSNNYIIPNKSEELEARFAGI | |
| | | DGTSTYTSGDQKTIKSTRKKNSGKTPHLLLMLLPSYR | |
| | | LESQQTNRRKKR | |
| TGF-β2 | 48-283 | VISIYNSTRDLLQEKASRRAAACERERSDEEYYAKEV | 232 |
| | | YKIDMPPFFPSENAIPPTFYRPYFRIVRFDVSAMEKNA | |
| | | SNLVKAEFRVFRLQNPKARVPEQRIELYQILKSKDLTS | |
| | | PTQRYIDSKVVKTRAEGEWLSFDVTDAVHEWLHHKD | |
| | | RNLGFKISLHCPCCTFVPSNNYIIPNKSEELEARFAGID | |
| | | GTSTYTSGDQKTIKSTRKKNSGKTPHLLLMLLPSYRL | |
| | | ESQQTNRRKKR | |
| TGF-β2 | 49-283 | ISIYNSTRDLLQEKASRRAAACERERSDEEYYAKEVY | 233 |
| | | KIDMPPFFPSENAIPPTFYRPYFRIVRFDVSAMEKNAS | |
| | | NLVKAEFRVFRLQNPKARVPEQRIELYQILKSKDLTSP | |
| | | TQRYIDSKVVKTRAEGEWLSFDVTDAVHEWLHHKD | |
| | | RNLGFKISLHCPCCTFVPSNNYIIPNKSEELEARFAGID | |
| | | GTSTYTSGDQKTIKSTRKKNSGKTPHLLLMLLPSYRL | |
| | | ESQQTNRRKKR | |
| TGF-β2 | 57-283 | DLLQEKASRRAAACERERSDEEYYAKEVYKIDMPPFF | 234 |
| | | PSENAIPPTFYRPYFRIVRFDVSAMEKNASNLVKAEFR | |
| | | VFRLQNPKARVPEQRIELYQILKSKDLTSPTQRYIDSK | |
| | | VVKTRAEGEWLSFDVTDAVHEWLHHKDRNLGFKISL | |
| | | HCPCCTFVPSNNYIIPNKSEELEARFAGIDGTSTYTSGD | |
| | | QKTIKSTRKKNSGKTPHLLLMLLPSYRLESQQTNRRK | |
| | | KR | |
| TGF-β2 | 58-283 | LLQEKASRRAAACERERSDEEYYAKEVYKIDMPPFFP | 235 |
| | | SENAIPPTFYRPYFRIVRFDVSAMEKNASNLVKAEFRV | |
| | | FRLQNPKARVPEQRIELYQILKSKDLTSPTQRYIDSKV | |
| | | VKTRAEGEWLSFDVTDAVHEWLHHKDRNLGFKISLH | |
| | | CPCCTFVPSNNYIIPNKSEELEARFAGIDGTSTYTSGDQ | |
| | | KTIKSTRKKNSGKTPHLLLMLLPSYRLESQQTNRRKKR | |
| TGF-β3 | 1-46 | SLSLSTCTTLDFGHIKKKRVEAIRGQILSKLRLTSPPEP | 43 |
| | | TVMTHVP | |
| TGF-β3 | 1-49 | SLSLSTSTTLDFGHIKKKRVEAIRGQILSKLRLTSPPEPT | 236 |
| C7S | | VMTHVPYQV | |
| TGF-β3 | 1-57 | SLSLSTSTTLDFGHIKKKRVEAIRGQILSKLRLTSPPEPT | 237 |
| C7S | | VMTHVPYQVLALYNSTR | |
| TGF-β3 | 1-58 | SLSLSTSTTLDFGHIKKKRVEAIRGQILSKLRLTSPPEPT | 238 |
| C7S | | VMTHVPYQVLALYNSTRE | |
| TGF-β3 | 1-79 | SLSLSTCTTLDFGHIKKKRVEAIRGQILSKLRLTSPPEP | 239 |
| | | TVMTHVPYQVLALYNSTRELLEEMHGEREEGCTQEN | |
| | | TESE | |
| TGF-β3 | 47-280 | YQVLALYNSTRELLEEMHGEREEGCTQENTESEYYA | 51 |
| | | KEIHKFDMIQGLAEHNELAVCPKGITSKVFRFNVSSVE | |
| | | KNRTNLFRAEFRVLRVPNPSSKRNEQRIELFQILRPDE | |
| | | HIAKQRYIGGKNLPTRGTAEWLSFDVTDTVREWLLR | |
| | | RESNLGLEISIHCPCHTFQPNGDILENIHEVMEIKFKGV | |
| | | DNEDDHGRGDLGRLKKQKDHHNPHLILMMIPPHRLD | |
| | | NPGQGGQRKKR | |
| TGF-β3 | 50-280 | LALYNSTRELLEEMHGEREEGCTQENTESEYYAKEIH | 240 |
| | | KFDMIQGLAEHNELAVCPKGITSKVFRFNVSSVEKNR | |
| | | TNLFRAEFRVLRVPNPSSKRNEQRIELFQILRPDEHIAK | |
| | | QRYIGGKNLPTRGTAEWLSFDVTDTVREWLLRRESN | |
| | | LGLEISIHCPCHTFQPNGDILENIHEVMEIKFKGVDNED | |
| | | DHGRGDLGRLKKQKDHHNPHLILMMIPPHRLDNPGQ | |
| | | GGQRKKR | |
| TGF-β3 | 58-280 | ELLEEMHGEREEGCTQENTESEYYAKEIHKFDMIQGL | 52 |
| | | AEHNELAVCPKGITSKVFRFNVSSVEKNRTNLFRAEF | |
| | | RVLRVPNPSSKRNEQRIELFQILRPDEHIAKQRYIGGK | |
| | | NLPTRGTAEWLSFDVTDTVREWLLRRESNLGLEISIHC | |
| | | PCHTFQPNGDILENIHEVMEIKFKGVDNEDDHGRGDL | |
| | | GRLKKQKDHHNPHLILMMIPPHRLDNPGQGGQRKKR | |
| TGF-β3 | 59-280 | LLEEMHGEREEGCTQENTESEYYAKEIHKFDMIQGLA | 241 |
| | | EHNELAVCPKGITSKVFRFNVSSVEKNRTNLFRAEFR | |
| | | VLRVPNPSSKRNEQRIELFQILRPDEHIAKQRYIGGKN | |
| | | LPTRGTAEWLSFDVTDTVREWLLRRESNLGLEISIHCP | |
| | | CHTFQPNGDILENIHEVMEIKFKGVDNEDDHGRGDLG | |
| | | RLKKQKDHHNPHLILMMIPPHRLDNPGQGGQRKKR | |
| TGF-β3 | 80-280 | YYAKEIHKFDMIQGLAEHNELAVCPKGITSKVFRFNV | 242 |
| | | SSVEKNRTNLFRAEFRVLRVPNPSSKRNEQRIELFQIL | |
| | | RPDEHIAKQRYIGGKNLPTRGTAEWLSFDVTDTVRE | |
| | | WLLRRESNLGLEISIHCPCHTFQPNGDILENIHEVMEIK | |
| | | FKGVDNEDDHGRGDLGRLKKQKDHHNPHLILMMIPP | |
| | | HRLDNPGQGGQRKKR | |
| TGF-β3 | 281-392 | ALDTNYCFRNLEENCCVRPLYIDFRQDLGWKWVHEP | 46 |
| | | KGYYANFCSGPCPYLRSADTTHSTVLGLYNTLNPEAS | |
| | | ASPCCVPQDLEPLTILYYVGRTPKVEQLSNMVVKSCK | |
| | | CS | |
| GDF-8 | 1-75 | NENSEQKENVEKEGLCNACTWRQNTKSSRIEAIKIQIL | 243 |
| | | SKLRLETAPNISKDVIRQLLPKAPPLRELIDQYDVQR | |
| GDF-8 | 1-64 | NENSEQKENVEKEGLCNACTWRQNTKSSRIEAIKIQIL | 73 |
| | | SKLRLETAPNISKDVIRQLLPKAPPL | |
| GDF-8 | 75-end | RDDSSDGSLEDDDYHATTETIITMPTESDFLMQVDGK | 244 |
| | | PKCCFFKFSSKIQYNKVVKAQLWIYLRPVETPTTVFV | |
| | | QILRLIKPMKDGTRYTGIRSLKLDMNPGTGIWQSIDVK | |
| | | TVLQNWLKQPESNLGIEIKALDENGHDLAVTFPGPGE | |
| | | DGLNPFLEVKVTDTPKRSRRDFGLDCDEHSTESRCCR | |
| | | YPLTVDFEAFGWDWIIAPKRYKANYCSGECEFVFLQK | |
| | | YPHTHLVHQANPRGSAGPCCTPTKMSPINMLYFNGK | |
| | | EQIIYGKIPAMVVDRCGCS | |
| GDF8 | 65-end | RELIDQYDVQRDDSSDGSLEDDDYHATTETIITMPTES | 245 |
| | | DFLMQVDGKPKCCFFKFSSKIQYNKVVKAQLWIYLR | |
| | | PVETPTTVFVQILRLIKPMKDGTRYTGIRSLKLDMNPG | |
| | | TGIWQSIDVKTVLQNWLKQPESNLGIEIKALDENGHD | |
| | | LAVTFPGPGEDGLNPFLEVKVTDTPKRSRRDFGLDCD | |
| | | EHSTESRCCRYPLTVDFEAFGWDWIIAPKRYKANYCS | |
| | | GECEFVFLQKYPHTHLVHQANPRGSAGPCCTPTKMSP | |
| | | INMLYFNGKEQIIYGKIPAMVVDRCGCS | |
| GDF8 | 65-243 | RELIDQYDVQRDDSSDGSLEDDDYHATTETIITMPTES | 78 |
| | | DFLMQVDGKPKCCFFKFSSKIQYNKVVKAQLWIYLR | |
| | | PVETPTTVFVQILRLIKPMKDGTRYTGIRSLKLDMNPG | |
| | | TGIWQSIDVKTVLQNWLKQPESNLGIEIKALDENGHD | |
| | | LAVTFPGPGEDGLNPFLEVKVTDTPKRSRR | |
| GDF-8 | 76-243 | DDSSDGSLEDDDYHATTETIITMPTESDFLMQVDGKP | 246 |
| | | KCCFFKFSSKIQYNKVVKAQLWIYLRPVETPTTVFVQI | |
| | | LRLIKPMKDGTRYTGIRSLKLDMNPGTGIWQSIDVKT | |
| | | VLQNWLKQPESNLGIEIKALDENGHDLAVTFPGPGED | |
| | | GLNPFLEVKVTDTPKRSRR | |
| GDF-8 | 244-352 | DFGLDCDEHSTESRCCRYPLTVDFEAFGWDWIIAPKR | 75 |
| | | YKANYCSGECEFVFLQKYPHTHLVHQANPRGSAGPC | |
| | | CTPTKMSPINMLYFNGKEQIIYGKIPAMVVDRCGCS | |
| GDF-11 | 1-86 | AEGPAAAAAAAAAAAAAGVGGERSSRPAPSVAPEPD | 74 |
| | | GCPVCVWRQHSRELRLESIKSQILSKLRLKEAPNISRE | |
| | | VVKQLLPKAPPL | |
| GDF-11 | 1-96 | AEGPAAAAAAAAAAAAAGVGGERSSRPAPSVAPEPD | 247 |
| | | GCPVCVWRQHSRELRLESIKSQILSKLRLKEAPNISRE | |
| | | VVKQLLPKAPPLQQILDLHDFQ | |
| GDF-11 | 1-108 | AEGPAAAAAAAAAAAAAGVGGERSSRPAPSVAPEPD | 248 |
| | | GCPVCVWRQHSRELRLESIKSQILSKLRLKEAPNISRE | |
| | | VVKQLLPKAPPLQQILDLHDFQGDALQPEDFLEE | |
| GDF-11 | 97-274 | GDALQPEDFLEEDEYHATTETVISMAQETDPAVQTDG | 249 |
| | | SPLCCHFHFSPKVMFTKVLKAQLWVYLRPVPRPATV | |
| | | YLQILRLKPLTGEGTAGGGGGGRRHIRIRSLKIELHSR | |
| | | SGHWQSIDFKQVLHSWFRQPQSNWGIEINAFDPSGTD | |
| | | LAVTSLGPGAEGLHPFMELRVLENTKRSRR | |
| GDF-11 | 87-274 | QQILDLHDFQGDALQPEDFLEEDEYHATTETVISMAQ | 79 |
| | | ETDPAVQTDGSPLCCHFHFSPKVMFTKVLKAQLWVY | |
| | | LRPVPRPATVYLQILRLKPLTGEGTAGGGGGGRRHIRI | |
| | | RSLKIELHSRSGHWQSIDFKQVLHSWFRQPQSNWGIEI | |
| | | NAFDPSGTDLAVTSLGPGAEGLHPFMELRVLENTKRS | |
| | | RR | |
| GDF-11 | 275-383 | NLGLDCDEHSSESRCCRYPLTVDFEAFGWDWIIAPKR | 76 |
| | | YKANYCSGQCEYMFMQKYPHTHLVQQANPRGSAGP | |
| | | CCTPTKMSPINMLYFNDKQQIIYGKIPGMVVDRCGCS | |
| Inhibin | 1-64 | SPTPGSEGHSAAPDCPSCALAALPKDVPNSQPEMVEA | 250 |
| Beta A | | VKKHILNMLHLKKRPDVTQPVPKAALL | |
| Inhibin | 1-76 | SPTPGSEGHSAAPDCPSCALAALPKDVPNSQPEMVEA | 251 |
| Beta A | | VKKHILNMLHLKKRPDVTQPVPKAALLNAIRKLHVG | |
| | | KVG | |
| Inhibin | 65-288 | NAIRKLHVGKVGENGYVEIEDDIGRRAEMNELMEQT | 252 |
| Beta A | | SEIITFAESGTARKTLHFEISKEGSDLSVVERAEVWLFL | |
| | | KVPKANRTRTKVTIRLFQQQKHPQGSLDTGEEAEEVG | |
| | | LKGERSELLLSEKVVDARKSTWHVFPVSSSIQRLLDQ | |
| | | GKSSLDVRIACEQCQESGASLVLLGKKKKKEEEGEGK | |
| | | KKGGGEGGAGADEEKEQSHRPFLMLQARQSEDHPHR | |
| | | RR | |
| Inhibin | 65-289 | NAIRKLHVGKVGENGYVEIEDDIGRRAEMNELMEQT | 253 |
| Beta A | | SEIITFAESGTARKTLHFEISKEGSDLSVVERAEVWLFL | |
| | | KVPKANRTRTKVTIRLFQQQKHPQGSLDTGEEAEEVG | |
| | | LKGERSELLLSEKVVDARKSTWHVFPVSSSIQRLLDQ | |
| | | GKSSLDVRIACEQCQESGASLVLLGKKKKKEEEGEGK | |
| | | KKGGGEGGAGADEEKEQSHRPFLMLQARQSEDHPHR | |
| | | RRR | |
| Inhibin | 65-290 | NAIRKLHVGKVGENGYVEIEDDIGRRAEMNELMEQT | 254 |
| Beta A | | SEIITFAESGTARKTLHFEISKEGSDLSVVERAEVWLFL | |
| | | KVPKANRTRTKVTIRLFQQQKHPQGSLDTGEEAEEVG | |
| | | LKGERSELLLSEKVVDARKSTWHVFPVSSSIQRLLDQ | |
| | | GKSSLDVRIACEQCQESGASLVLLGKKKKKEEEGEGK | |
| | | KKGGGEGGAGADEEKEQSHRPFLMLQARQSEDHPHR | |
| | | RRRR | |
| Inhibin | 77-289 | ENGYVEIEDDIGRRAEMNELMEQTSEIITFAESGTARK | 255 |
| Beta A | | TLHFEISKEGSDLSVVERAEVWLFLKVPKANRTRTKV | |
| | | TIRLFQQQKHPQGSLDTGEEAEEVGLKGERSELLLSEK | |
| | | VVDARKSTWHVFPVSSSIQRLLDQGKSSLDVRIACEQ | |
| | | CQESGASLVLLGKKKKKEEEGEGKKKGGGEGGAGA | |
| | | DEEKEQSHRPFLMLQARQSEDHPHRRRR | |
| Inhibin | 77-290 | ENGYVEIEDDIGRRAEMNELMEQTSEIITFAESGTARK | 256 |
| Beta A | | TLHFEISKEGSDLSVVERAEVWLFLKVPKANRTRTKV | |
| | | TIRLFQQQKHPQGSLDTGEEAEEVGLKGERSELLLSEK | |
| | | VVDARKSTWHVFPVSSSIQRLLDQGKSSLDVRIACEQ | |
| | | CQESGASLVLLGKKKKKEEEGEGKKKGGGEGGAGA | |
| | | DEEKEQSHRPFLMLQARQSEDHPHRRRRR | |
| Inhibin | 77-end | ENGYVEIEDDIGRRAEMNELMEQTSEIITFAESGTARK | 257 |
| Beta A | | TLHFEISKEGSDLSVVERAEVWLFLKVPKANRTRTKV | |
| | | TIRLFQQQKHPQGSLDTGEEAEEVGLKGERSELLLSEK | |
| | | VVDARKSTWHVFPVSSSIQRLLDQGKSSLDVRIACEQ | |
| | | CQESGASLVLLGKKKKKEEEGEGKKKGGGEGGAGA | |
| | | DEEKEQSHRPFLMLQARQSEDHPHRRRRRGLECDGK | |
| | | VNICCKKQFFVSFKDIGWNDWIIAPSGYHANYCEGEC | |
| | | PSHIAGTSGSSLSFHSTVINHYRMRGHSPFANLKSCCV | |
| | | PTKLRPMSMLYYDDGQNIIKKDIQNMIVEECGCS | |
| Inhibin | 291-406 | GLECDGKVNICCKKQFFVSFKDIGWNDWIIAPSGYHA | 258 |
| Beta A | | NYCEGECPSHIAGTSGSSLSFHSTVINHYRMRGHSPFA | |
| | | NLKSCCVPTKLRPMSMLYYDDGQNIIKKDIQNMIVEE | |
| | | CGCS | |

[0100] In some embodiments, chimeric proteins of the present invention may comprise combinations of any of the protein modules listed in Table 14. Some chimeric proteins comprising GPCs may comprise protein modules that have been substituted with any of the protein modules listed in Table 14.

[0101] In some embodiments, chimeric proteins may comprise protein modules from GDFs and/or inhibins. Such GDFs may include GDF-11 and/or GDF-8. Some such chimeric proteins may comprise a prodomain from GDF-11 and a growth factor from GDF-8. In such embodiments, chimeric proteins may comprise substituted N-terminal regions between GDF-11 and GDF-8. In other embodiments, chimeric proteins may comprise a prodomain from GDF-8 and a growth factor from GDF-11. Such chimeric proteins may comprise amino acid residues 1-108 from GDF-11 and amino acid residues 90-the end of the protein from GDF-8. Some chimeric proteins may comprise an arm region from GDF-11.

[0102] Some chimerics of the present invention may comprise GDF-8 comprising an arm region of GDF-11. Such chimerics may be unstable due to steric clash between residue F95 from the GDF-11 arm and the α2 helix of the chimeric GPC. Therefore, in some cases, GDF8/GDF11/Activin chimeras may be designed so that the ARM region of such chimeric proteins contains the α2 helix. Furthermore, F95 may be an important residue in conferring latency for GDF11. This residue is in a similar position as a Camurati-Engelmann mutation found in TGF-β1, Y81H (see FIG. 8), thus, mutation of this residue to a smaller amino acid, such as an Alanine, may be carried out to promote dissociation of the mature GDF11 growth factor from the GPC. Such mutants may be useful as positive control molecules in designing assays to screen for GDF11 activating antibodies.

[0103] In some embodiments, chimeric proteins of the present invention may comprise protein module combinations including, but not limited to the combinations of protein modules and/or amino acid sequences listed in Table 15. Some chimeric proteins of the present invention may comprise protein modules comprising amino acid sequences similar to those in Table 15, but comprising additional or fewer amino acids than those listed. Such amino acid sequences may comprise about 1 more or fewer amino acids, about 2 more or fewer amino acids, about 3 more or fewer amino acids, about 4 more or fewer amino acids, about 5 more or fewer amino acids, about 6 more or fewer amino acids, about 7 more or fewer amino acids, about 8 more or fewer amino acids, about 9 more or fewer amino acids, about 10 more or fewer amino acids or greater than 10 more or fewer amino acids on N-terminal and/or C-terminal ends. In some cases, these sequences are expressed in association with N- and/or C-terminal secretion signal sequences [e.g. human Ig kappa chains with amino acid sequence MDMRVPAQLLGLLLLWFSGVLG (SEQ ID NO: 99)], flag tag sequences [e.g. DYKDDDDK (SEQ ID NO: 100)], one or more 3C protease cleavage site [e.g. LEVLFQGP (SEQ ID NO: 101)], one or more biotinylation site and/or His-tag sequences [e.g. HHHHHH (SEQ ID NO: 102)].

TABLE 15
Protein module combinations

| | | | | SEQ |
|---|---|---|---|---|
| Protein | Protein | Protein | | ID |
| module 1 | module 2 | module 3 | Chimeric Sequence | NO |
| TGF-β2 | TGF-β1 | N/A | SLSTCSTLDMDQFMRKRIEAIRGQILSKLKLTSPPE | 259 |
| LAP | growth | | DYPEPEEVPPEVISIYNSTRDLLQEKASRRAAACE | |
| | factor | | RERSDEEYYAKEVYKIDMPPFFPSENAIPPTFYRPY | |
| | | | FRIVRFDVSAMEKNASNLVKAEFRVFRLQNPKAR | |
| | | | VPEQRIELYQILKSKDLTSPTQRYIDSKVVKTRAE | |
| | | | GEWLSFDVTDAVHEWLHHKDRNLGFKISLHCPC | |
| | | | CTFVPSNNYIIPNKSEELEARFAGIDGTSTYTSGDQ | |
| | | | KTIKSTRKKNSGKTPHLLLMLLPSYRLESQQTNRR | |
| | | | KKRALDTNYCFSSTEKNCCVRQLYIDFRKDLGWK | |
| | | | WIHEPKGYHANFCLGPCPYIWSLDTQYSKVLALY | |
| | | | NQHNPGASAAPCCVPQALEPLPIVYYVGRKPKVE | |
| | | | QLSNMIVRSCKCS | |
| TGF-β3 | TGF-β1 | N/A | SLSLSTCTTLDFGHIKKKRVEAIRGQILSKLRLTSP | 260 |
| LAP | growth | | PEPTVMTHVPYQVLALYNSTRELLEEMHGEREEG | |
| | factor | | CTQENTESEYYAKEIHKFDMIQGLAEHNELAVCP | |
| | | | KGITSKVFRFNVSSVEKNRTNLFRAEFRVLRVPNP | |
| | | | SSKRNEQRIELFQILRPDEHIAKQRYIGGKNLPTRG | |
| | | | TAEWLSFDVTDTVREWLLRRESNLGLEISIHCPCH | |
| | | | TFQPNGDILENIHEVMEIKFKGVDNEDDHGRGDL | |
| | | | GRLKKQKDHHNPHLILMMIPPHRLDNPGQGGQR | |
| | | | KKRALDTNYCFSSTEKNCCVRQLYIDFRKDLGWK | |
| | | | WIHEPKGYHANFCLGPCPYIWSLDTQYSKVLALY | |
| | | | NQHNPGASAAPCCVPQALEPLPIVYYVGRKPKVE | |
| | | | QLSNMIVRSCKCS | |
| TGF-β3 | TGF-β1 | N/A | SLSLSTCTTLDFGHIKKKRVEAIRGQILSKLRLTSP | 261 |
| (1-46) | (47-end) | | PEPTVMTHVPAVLALYNSTRDRVAGESAEPEPEP | |
| | | | EADYYAKEVTRVLMVETHNEIYDKFKQSTHSIYM | |
| | | | FFNTSELREAVPEPVLLSRAELRLLRLKLKVEQHV | |
| | | | ELYQKYSNNSWRYLSNRLLAPSDSPEWLSFDVTG | |
| | | | VVRQWLSRGGEIEGFRLSAHCSCDSRDNTLQVDI | |
| | | | NGFTTGRRGDLATIHGMNRPFLLLMATPLERAQH | |
| | | | LQSSRHRRALDTNYCFSSTEKNCCVRQLYIDFRK | |
| | | | DLGWKWIHEPKGYHANFCLGPCPYIWSLDTQYS | |
| | | | KVLALYNQHNPGASAAPCCVPQALEPLPIVYYVG | |
| | | | RKPKVEQLSNMIVRSCKCS | |
| TGF-β3 | TGF-β1 | N/A | SLSLSTCTTLDFGHIKKKRVEAIRGQILSKLRLTSP | 262 |
| (1-79) | (75-end) | | PEPTVMTHVPYQVLALYNSTRELLEEMHGEREEG | |
| | | | CTQENTESEYAKEVTRVLMVETHNEIYDKFKQST | |
| | | | HSIYMFFNTSELREAVPEPVLLSRAELRLLRLKLK | |
| | | | VEQHVELYQKYSNNSWRYLSNRLLAPSDSPEWLS | |
| | | | FDVTGVVRQWLSRGGEIEGFRLSAHCSCDSRDNT | |
| | | | LQVDINGFTTGRRGDLATIHGMNRPFLLLMATPL | |
| | | | ERAQHLQSSRHRRALDTNYCFSSTEKNCCVRQLY | |
| | | | IDFRKDLGWKWIHEPKGYHANFCLGPCPYIWSLD | |
| | | | TQYSKVLALYNQHNPGASAAPCCVPQALEPLPIV | |
| | | | YYVGRKPKVEQLSNMIVRSCKCS | |
| TGF-β1 | TGF-β3 | TGF-β1 | LSTCKTIDMELVKRKRIEAIRGQILSKLRLASPPSQ | 263 |
| (1-74) | (80-280) | (250-361) | GEVPPGPLPEAVLALYNSTRDRVAGESAEPEPEPE | |
| | | | ADYYYAKEIHKFDMIQGLAEHNELAVCPKGITSK | |
| | | | VFRFNVSSVEKNRTNLFRAEFRVLRVPNPSSKRNE | |
| | | | QRIELFQILRPDEHIAKQRYIGGKNLPTRGTAEWL | |
| | | | SFDVTDTVREWLLRRESNLGLEISIHCPCHTFQPN | |
| | | | GDILENIHEVMEIKFKGVDNEDDHGRGDLGRLKK | |
| | | | QKDHHNPHLILMMIPPHRLDNPGQGGQRKKRAL | |
| | | | DTNYCFSSTEKNCCVRQLYIDFRKDLGWKWIHEP | |
| | | | KGYHANFCLGPCPYIWSLDTQYSKVLALYNQHNP | |
| | | | GASAAPCCVPQALEPLPIVYYVGRKPKVEQLSNM | |
| | | | IVRSCKCS | |
| TGF-β3 | TGF-β1 | TGF-β3 | SLSLSTCTTLDFGHIKKKRVEAIRGQILSKLRLTSP | 264 |
| (1-79) | (75-249) | (281-392) | PEPTVMTHVPYQVLALYNSTRELLEEMHGEREEG | |
| | | | CTQENTESEYAKEVTRVLMVETHNEIYDKFKQST | |
| | | | HSIYMFFNTSELREAVPEPVLLSRAELRLLRLKLK | |
| | | | VEQHVELYQKYSNNSWRYLSNRLLAPSDSPEWLS | |
| | | | FDVTGVVRQWLSRGGEIEGFRLSAHCSCDSRDNT | |
| | | | LQVDINGFTTGRRGDLATIHGMNRPFLLLMATPL | |
| | | | ERAQHLQSSRHRRALDTNYCFRNLEENCCVRPLY | |
| | | | IDFRQDLGWKWVHEPKGYYANFCSGPCPYLRSA | |
| | | | DTTHSTVLGLYNTLNPEASASPCCVPQDLEPLTIL | |
| | | | YYVGRTPKVEQLSNMVVKSCKCS | |
| TGF-β1 | TGF-β2 | TGF-β1 | LSTCKTIDMELVKRKRIEAIRGQILSKLRLASPPSQ | 265 |
| (1-207) | trigger | (228-361) | GEVPPGPLPEAVLALYNSTRDRVAGESAEPEPEPE | |
| | loop | | ADYYAKEVTRVLMVETHNEIYDKFKQSTHSIYMF | |
| | Short | | FNTSELREAVPEPVLLSRAELRLLRLKLKVEQHVE | |
| | (236-254) | | LYQKYSNNSWRYLSNRLLAPSDSPEWLSFDVTGV | |
| | | | VRQWLSRGGEIEGFRLSAHCSCDSRDNTLQVDIG | |
| | | | TSTYTSGDQKTIKSTRKKFLLLMATPLERAQHLQS | |
| | | | SRHRRALDTNYCFSSTEKNCCVRQLYIDFRKDLG | |
| | | | WKWIHEPKGYHANFCLGPCPYIWSLDTQYSKVL | |
| | | | ALYNQHNPGASAAPCCVPQALEPLPIVYYVGRKP | |
| | | | KVEQLSNMIVRSCKCS | |
| TGF-β1 | TGF-β2 | TGF-β1 | LSTCKTIDMELVKRKRIEAIRGQILSKLRLASPPSQ | 266 |
| (1-207) | trigger | (228-361) | GEVPPGPLPEAVLALYNSTRDRVAGESAEPEPEPE | |
| | loop | | ADYYAKEVTRVLMVETHNEIYDKFKQSTHSIYMF | |
| | Long | | FNTSELREAVPEPVLLSRAELRLLRLKLKVEQHVE | |
| | (232-260) | | LYQKYSNNSWRYLSNRLLAPSDSPEWLSFDVTGV | |
| | | | VRQWLSRGGEIEGFRLSAHCSCDSRDNTLQVDIA | |
| | | | GIDGTSTYTSGDQKTIKSTRKKNSGKTPFLLLMAT | |
| | | | PLERAQHLQSSRHRRALDTNYCFSSTEKNCCVRQ | |
| | | | LYIDFRKDLGWKWIHEPKGYHANFCLGPCPYIWS | |
| | | | LDTQYSKVLALYNQHNPGASAAPCCVPQALEPLP | |
| | | | IVYYVGRKPKVEQLSNMIVRSCKCS | |
| GDF-11 | GDF-8 | GDF-11 | AEGPAAAAAAAAAAAAAGVGGERSSRPAPSVAP | 267 |
| (1-96) | (76-243) | (275-383) | EPDGCPVCVWRQHSRELRLESIKSQILSKLRLKEA | |
| | | | PNISREVVKQLLPKAPPLQQILDLHDFQDDSSDGS | |
| | | | LEDDDYHATTETIITMPTESDFLMQVDGKPKCCFF | |
| | | | KFSSKIQYNKVVKAQLWIYLRPVETPTTVFVQILR | |
| | | | LIKPMKDGTRYTGIRSLKLDMNPGTGIWQSIDVKT | |
| | | | VLQNWLKQPESNLGIEIKALDENGHDLAVTFPGP | |
| | | | GEDGLNPFLEVKVTDTPKRSRRNLGLDCDEHSSE | |
| | | | SRCCRYPLTVDFEAFGWDWIIAPKRYKANYCSGQ | |
| | | | CEYMFMQKYPHTHLVQQANPRGSAGPCCTPTKM | |
| | | | SPINMLYFNDKQQIIYGKIPGMVVDRCGCS | |
| GDF-11 | GDF-8 | GDF-11 | AEGPAAAAAAAAAAAAAGVGGERSSRPAPSVAP | 268 |
| (1-86) | (65-243) | (275-383) | EPDGCPVCVWRQHSRELRLESIKSQILSKLRLKEA | |
| | | | PNISREVVKQLLPKAPPLRELIDQYDVQRDDSSDG | |
| | | | SLEDDDYHATTETIITMPTESDFLMQVDGKPKCCF | |
| | | | FKFSSKIQYNKVVKAQLWIYLRPVETPTTVFVQIL | |
| | | | RLIKPMKDGTRYTGIRSLKLDMNPGTGIWQSIDV | |
| | | | KTVLQNWLKQPESNLGIEIKALDENGHDLAVTFP | |
| | | | GPGEDGLNPFLEVKVTDTPKRSRRNLGLDCDEHS | |
| | | | SESRCCRYPLTVDFEAFGWDWIIAPKRYKANYCS | |
| | | | GQCEYMFMQKYPHTHLVQQANPRGSAGPCCTPT | |
| | | | KMSPINMLYFNDKQQIIYGKIPGMVVDRCGCS | |
| GDF-11 | GDF-8 | N/A | AEGPAAAAAAAAAAAAAGVGGERSSRPAPSVAP | 269 |
| (1-96) | (76-243) | | EPDGCPVCVWRQHSRELRLESIKSQILSKLRLKEA | |
| | | | PNISREVVKQLLPKAPPLQQILDLHDFQDDSSDGS | |
| | | | LEDDDYHATTETIITMPTESDFLMQVDGKPKCCFF | |
| | | | KFSSKIQYNKVVKAQLWIYLRPVETPTTVFVQILR | |
| | | | LIKPMKDGTRYTGIRSLKLDMNPGTGIWQSIDVKT | |
| | | | VLQNWLKQPESNLGIEIKALDENGHDLAVTFPGP | |
| | | | GEDGLNPFLEVKVTDTPKRSRR | |
| GDF-11 | GDF-8 | NA | AEGPAAAAAAAAAAAAAGVGGERSSRPAPSVAP | 270 |
| (1-86) | (65-243) | | EPDGCPVCVWRQHSRELRLESIKSQILSKLRLKEA | |
| | | | PNISREVVKQLLPKAPPLRELIDQYDVQRDDSSDG | |
| | | | SLEDDDYHATTETIITMPTESDFLMQVDGKPKCCF | |
| | | | FKFSSKIQYNKVVKAQLWIYLRPVETPTTVFVQIL | |
| | | | RLIKPMKDGTRYTGIRSLKLDMNPGTGIWQSIDV | |
| | | | KTVLQNWLKQPESNLGIEIKALDENGHDLAVTFP | |
| | | | GPGEDGLNPFLEVKVTDTPKRSRR | |
| GDF-11 | Inhibin | GDF-11 | AEGPAAAAAAAAAAAAAGVGGERSSRPAPSVAP | 271 |
| (1-96) | Beta A | (275-383) | EPDGCPVCVWRQHSRELRLESIKSQILSKLRLKEA | |
| | (77-290) | | PNISREVVKQLLPKAPPLQQILDLHDFQENGYVEI | |
| | | | EDDIGRRAEMNELMEQTSEIITFAESGTARKTLHF | |
| | | | EISKEGSDLSVVERAEVWLFLKVPKANRTRTKVTI | |
| | | | RLFQQQKHPQGSLDTGEEAEEVGLKGERSELLLS | |
| | | | EKVVDARKSTWHVFPVSSSIQRLLDQGKSSLDVRI | |
| | | | ACEQCQESGASLVLLGKKKKKEEEGEGKKKGGG | |
| | | | EGGAGADEEKEQSHRPFLMLQARQSEDHPHRRR | |
| | | | RRNLGLDCDEHSSESRCCRYPLTVDFEAFGWDWI | |
| | | | IAPKRYKANYCSGQCEYMFMQKYPHTHLVQQAN | |
| | | | PRGSAGPCCTPTKMSPINMLYFNDKQQIIYGKIPG | |
| | | | MVVDRCGCS | |
| GDF-11 | Inhibin | GDF-11 | AEGPAAAAAAAAAAAAAGVGGERSSRPAPSVAP | 272 |
| (1-86) | Beta A | (275-383) | EPDGCPVCVWRQHSRELRLESIKSQILSKLRLKEA | |
| | (65-290) | | PNISREVVKQLLPKAPPLNAIRKLHVGKVGENGY | |
| | | | VEIEDDIGRRAEMNELMEQTSEIITFAESGTARKTL | |
| | | | HFEISKEGSDLSVVERAEVWLFLKVPKANRTRTK | |
| | | | VTIRLFQQQKHPQGSLDTGEEAEEVGLKGERSELL | |
| | | | LSEKVVDARKSTWHVFPVSSSIQRLLDQGKSSLD | |
| | | | VRIACEQCQESGASLVLLGKKKKKEEEGEGKKKG | |
| | | | GGEGGAGADEEKEQSHRPFLMLQARQSEDHPHR | |
| | | | RRRRNLGLDCDEHSSESRCCRYPLTVDFEAFGWD | |
| | | | WIIAPKRYKANYCSGQCEYMFMQKYPHTHLVQQ | |
| | | | ANPRGSAGPCCTPTKMSPINMLYFNDKQQIIYGKI | |
| | | | PGMVVDRCGCS | |
| GDF-11 | Inhibin | N/A | AEGPAAAAAAAAAAAAAGVGGERSSRPAPSVAP | 273 |
| (1-96) | Beta A | | EPDGCPVCVWRQHSRELRLESIKSQILSKLRLKEA | |
| | (77-290) | | PNISREVVKQLLPKAPPLQQILDLHDFQENGYVEI | |
| | | | EDDIGRRAEMNELMEQTSEIITFAESGTARKTLHF | |
| | | | EISKEGSDLSVVERAEVWLFLKVPKANRTRTKVTI | |
| | | | RLFQQQKHPQGSLDTGEEAEEVGLKGERSELLLS | |
| | | | EKVVDARKSTWHVFPVSSSIQRLLDQGKSSLDVRI | |
| | | | ACEQCQESGASLVLLGKKKKKEEEGEGKKKGGG | |
| | | | EGGAGADEEKEQSHRPFLMLQARQSEDHPHRRR | |
| | | | RR | |
| GDF-11 | Inhibin | NA | AEGPAAAAAAAAAAAAAGVGGERSSRPAPSVAP | 274 |
| (1-86) | Beta A | | EPDGCPVCVWRQHSRELRLESIKSQILSKLRLKEA | |
| | (65-290) | | PNISREVVKQLLPKAPPLNAIRKLHVGKVGENGY | |
| | | | VEIEDDIGRRAEMNELMEQTSEIITFAESGTARKTL | |
| | | | HFEISKEGSDLSVVERAEVWLFLKVPKANRTRTK | |
| | | | VTIRLFQQQKHPQGSLDTGEEAEEVGLKGERSELL | |
| | | | LSEKVVDARKSTWHVFPVSSSIQRLLDQGKSSLD | |
| | | | VRIACEQCQESGASLVLLGKKKKKEEEGEGKKKG | |
| | | | GGEGGAGADEEKEQSHRPFLMLQARQSEDHPHR | |
| | | | RRRR | |
| GDF-8 | GDF-11 | GDF-8 | NENSEQKENVEKEGLCNACTWRQNTKSSRIEAIKI | 275 |
| (1-75) | (97-274) | (244-352) | QILSKLRLETAPNISKDVIRQLLPKAPPLRELIDQY | |
| | | | DVQRGDALQPEDFLEEDEYHATTETVISMAQETD | |
| | | | PAVQTDGSPLCCHFHFSPKVMFTKVLKAQLWVY | |
| | | | LRPVPRPATVYLQILRLKPLTGEGTAGGGGGGRR | |
| | | | HIRIRSLKIELHSRSGHWQSIDFKQVLHSWFRQPQS | |
| | | | NWGIEINAFDPSGTDLAVTSLGPGAEGLHPFMELR | |
| | | | VLENTKRSRRDFGLDCDEHSTESRCCRYPLTVDFE | |
| | | | AFGWDWIIAPKRYKANYCSGECEFVFLQKYPHTH | |
| | | | LVHQANPRGSAGPCCTPTKMSPINMLYFNGKEQII | |
| | | | YGKIPAMVVDRCGCS | |
| GDF-8 | GDF-11 | GDF-8 | NENSEQKENVEKEGLCNACTWRQNTKSSRIEAIKI | 276 |
| (1-64) | (87-274) | (244-352) | QILSKLRLETAPNISKDVIRQLLPKAPPLQQILDLH | |
| | | | DFQGDALQPEDFLEEDEYHATTETVISMAQETDP | |
| | | | AVQTDGSPLCCHFHFSPKVMFTKVLKAQLWVYL | |
| | | | RPVPRPATVYLQILRLKPLTGEGTAGGGGGGRRHI | |
| | | | RIRSLKIELHSRSGHWQSIDFKQVLHSWFRQPQSN | |
| | | | WGIEINAFDPSGTDLAVTSLGPGAEGLHPFMELRV | |
| | | | LENTKRSRRDFGLDCDEHSTESRCCRYPLTVDFEA | |
| | | | FGWDWIIAPKRYKANYCSGECEFVFLQKYPHTHL | |
| | | | VHQANPRGSAGPCCTPTKMSPINMLYFNGKEQIIY | |
| | | | GKIPAMVVDRCGCS | |
| GDF-8 | GDF-11 | N/A | NENSEQKENVEKEGLCNACTWRQNTKSSRIEAIKI | 277 |
| (1-75) | (97-274) | | QILSKLRLETAPNISKDVIRQLLPKAPPLRELIDQY | |
| | | | DVQRGDALQPEDFLEEDEYHATTETVISMAQETD | |
| | | | PAVQTDGSPLCCHFHFSPKVMFTKVLKAQLWVY | |
| | | | LRPVPRPATVYLQILRLKPLTGEGTAGGGGGGRR | |
| | | | HIRIRSLKIELHSRSGHWQSIDFKQVLHSWFRQPQS | |
| | | | NWGIEINAFDPSGTDLAVTSLGPGAEGLHPFMELR | |
| | | | VLENTKRSRR | |
| GDF-8 | GDF-11 | GDF-8 | NENSEQKENVEKEGLCNACTWRQNTKSSRIEAIKI | 278 |
| (1-64) | (87-274) | (244-352) | QILSKLRLETAPNISKDVIRQLLPKAPPLQQILDLH | |
| | | | DFQGDALQPEDFLEEDEYHATTETVISMAQETDP | |
| | | | AVQTDGSPLCCHFHFSPKVMFTKVLKAQLWVYL | |
| | | | RPVPRPATVYLQILRLKPLTGEGTAGGGGGGRRHI | |
| | | | RIRSLKIELHSRSGHWQSIDFKQVLHSWFRQPQSN | |
| | | | WGIEINAFDPSGTDLAVTSLGPGAEGLHPFMELRV | |
| | | | LENTKRSRRDFGLDCDEHSTESRCCRYPLTVDFEA | |
| | | | FGWDWIIAPKRYKANYCSGECEFVFLQKYPHTHL | |
| | | | VHQANPRGSAGPCCTPTKMSPINMLYFNGKEQIIY | |
| | | | GKIPAMVVDRCGCS | |
| GDF-8 | Inhibin | GDF-8 | NENSEQKENVEKEGLCNACTWRQNTKSSRIEAIKI | 279 |
| (1-75) | Beta A | (244-352) | QILSKLRLETAPNISKDVIRQLLPKAPPLRELIDQY | |
| | (77-289) | | DVQRENGYVEIEDDIGRRAEMNELMEQTSEIITFA | |
| | | | ESGTARKTLHFEISKEGSDLSVVERAEVWLFLKVP | |
| | | | KANRTRTKVTIRLFQQQKHPQGSLDTGEEAEEVG | |
| | | | LKGERSELLLSEKVVDARKSTWHVFPVSSSIQRLL | |
| | | | DQGKSSLDVRIACEQCQESGASLVLLGKKKKKEE | |
| | | | EGEGKKKGGGEGGAGADEEKEQSHRPFLMLQAR | |
| | | | QSEDHPHRRRRDFGLDCDEHSTESRCCRYPLTVD | |
| | | | FEAFGWDWIIAPKRYKANYCSGECEFVFLQKYPH | |
| | | | THLVHQANPRGSAGPCCTPTKMSPINMLYFNGKE | |
| | | | QIIYGKIPAMVVDRCGCS | |
| GDF-8 | Inhibin | GDF-8 | NENSEQKENVEKEGLCNACTWRQNTKSSRIEAIKI | 280 |
| (1-64) | Beta A | (244-352) | QILSKLRLETAPNISKDVIRQLLPKAPPLNAIRKLH | |
| | (65-290) | | VGKVGENGYVEIEDDIGRRAEMNELMEQTSEIITF | |
| | | | AESGTARKTLHFEISKEGSDLSVVERAEVWLFLK | |
| | | | VPKANRTRTKVTIRLFQQQKHPQGSLDTGEEAEE | |
| | | | VGLKGERSELLLSEKVVDARKSTWHVFPVSSSIQR | |
| | | | LLDQGKSSLDVRIACEQCQESGASLVLLGKKKKK | |
| | | | EEEGEGKKKGGGEGGAGADEEKEQSHRPFLMLQ | |
| | | | ARQSEDHPHRRRRRDFGLDCDEHSTESRCCRYPL | |
| | | | TVDFEAFGWDWIIAPKRYKANYCSGECEFVFLQK | |
| | | | YPHTHLVHQANPRGSAGPCCTPTKMSPINMLYFN | |
| | | | GKEQIIYGKIPAMVVDRCGCS | |
| GDF-8 | Inhibin | N/A | NENSEQKENVEKEGLCNACTWRQNTKSSRIEAIKI | 281 |
| (1-75) | Beta A | | QILSKLRLETAPNISKDVIRQLLPKAPPLRELIDQY | |
| | (77-290) | | DVQRENGYVEIEDDIGRRAEMNELMEQTSEIITFA | |
| | | | ESGTARKTLHFEISKEGSDLSVVERAEVWLFLKVP | |
| | | | KANRTRTKVTIRLFQQQKHPQGSLDTGEEAEEVG | |
| | | | LKGERSELLLSEKVVDARKSTWHVFPVSSSIQRLL | |
| | | | DQGKSSLDVRIACEQCQESGASLVLLGKKKKKEE | |
| | | | EGEGKKKGGGEGGAGADEEKEQSHRPFLMLQAR | |
| | | | QSEDHPHRRRRR | |
| GDF-8 | Inhibin | NA | NENSEQKENVEKEGLCNACTWRQNTKSSRIEAIKI | 282 |
| (1-64) | Beta A | | QILSKLRLETAPNISKDVIRQLLPKAPPLNAIRKLH | |
| | (65-290) | | VGKVGENGYVEIEDDIGRRAEMNELMEQTSEIITF | |
| | | | AESGTARKTLHFEISKEGSDLSVVERAEVWLFLK | |
| | | | VPKANRTRTKVTIRLFQQQKHPQGSLDTGEEAEE | |
| | | | VGLKGERSELLLSEKVVDARKSTWHVFPVSSSIQR | |
| | | | LLDQGKSSLDVRIACEQCQESGASLVLLGKKKKK | |
| | | | EEEGEGKKKGGGEGGAGADEEKEQSHRPFLMLQ | |
| | | | ARQSEDHPHRRRRR | |
| Inhibin | GDF-8 | Inhibin | SPTPGSEGHSAAPDCPSCALAALPKDVPNSQPEM | 283 |
| Beta A | (76-243) | Beta A | VEAVKKHILNMLHLKKRPDVTQPVPKAALLNAIR | |
| (1-76) | | (291-406) | KLHVGKVGDDSSDGSLEDDDYHATTETIITMPTES | |
| | | | DFLMQVDGKPKCCFFKFSSKIQYNKVVKAQLWIY | |
| | | | LRPVETPTTVFVQILRLIKPMKDGTRYTGIRSLKLD | |
| | | | MNPGTGIWQSIDVKTVLQNWLKQPESNLGIEIKA | |
| | | | LDENGHDLAVTFPGPGEDGLNPFLEVKVTDTPKR | |
| | | | SRRGLECDGKVNICCKKQFFVSFKDIGWNDWIIAP | |
| | | | SGYHANYCEGECPSHIAGTSGSSLSFHSTVINHYR | |
| | | | MRGHSPFANLKSCCVPTKLRPMSMLYYDDGQNII | |
| | | | KKDIQNMIVEECGCS | |
| Inhibin | GDF-8 | Inhibin | SPTPGSEGHSAAPDCPSCALAALPKDVPNSQPEM | 284 |
| Beta A | (65-243) | Beta A | VEAVKKHILNMLHLKKRPDVTQPVPKAALLRELI | |
| (1-64) | | (291-406) | DQYDVQRDDSSDGSLEDDDYHATTETIITMPTES | |
| | | | DFLMQVDGKPKCCFFKFSSKIQYNKVVKAQLWIY | |
| | | | LRPVETPTTVFVQILRLIKPMKDGTRYTGIRSLKLD | |
| | | | MNPGTGIWQSIDVKTVLQNWLKQPESNLGIEIKA | |
| | | | LDENGHDLAVTFPGPGEDGLNPFLEVKVTDTPKR | |
| | | | SRRGLECDGKVNICCKKQFFVSFKDIGWNDWIIAP | |
| | | | SGYHANYCEGECPSHIAGTSGSSLSFHSTVINHYR | |
| | | | MRGHSPFANLKSCCVPTKLRPMSMLYYDDGQNII | |
| | | | KKDIQNMIVEECGCS | |
| Inhibin | GDF-8 | N/A | SPTPGSEGHSAAPDCPSCALAALPKDVPNSQPEM | 285 |
| Beta A | (76-243) | | VEAVKKHILNMLHLKKRPDVTQPVPKAALLNAIR | |
| (1-76) | | | KLHVGKVGDDSSDGSLEDDDYHATTETIITMPTES | |
| | | | DFLMQVDGKPKCCFFKFSSKIQYNKVVKAQLWIY | |
| | | | LRPVETPTTVFVQILRLIKPMKDGTRYTGIRSLKLD | |
| | | | MNPGTGIWQSIDVKTVLQNWLKQPESNLGIEIKA | |
| | | | LDENGHDLAVTFPGPGEDGLNPFLEVKVTDTPKR | |
| | | | SRR | |
| Inhibin | GDF-8 | NA | SPTPGSEGHSAAPDCPSCALAALPKDVPNSQPEM | 286 |
| Beta A | (65-243) | | VEAVKKHILNMLHLKKRPDVTQPVPKAALLRELI | |
| (1-64) | | | DQYDVQRDDSSDGSLEDDDYHATTETIITMPTES | |
| | | | DFLMQVDGKPKCCFFKFSSKIQYNKVVKAQLWIY | |
| | | | LRPVETPTTVFVQILRLIKPMKDGTRYTGIRSLKLD | |
| | | | MNPGTGIWQSIDVKTVLQNWLKQPESNLGIEIKA | |
| | | | LDENGHDLAVTFPGPGEDGLNPFLEVKVTDTPKR | |
| | | | SRR | |
| Inhibin | GDF-11 | Inhibin | SPTPGSEGHSAAPDCPSCALAALPKDVPNSQPEM | 287 |
| Beta A | (97-274) | Beta A | VEAVKKHILNMLHLKKRPDVTQPVPKAALLNAIR | |
| (1-76) | | (291-406) | KLHVGKVGGDALQPEDFLEEDEYHATTETVISMA | |
| | | | QETDPAVQTDGSPLCCHFHFSPKVMFTKVLKAQL | |
| | | | WVYLRPVPRPATVYLQILRLKPLTGEGTAGGGGG | |
| | | | GRRHIRIRSLKIELHSRSGHWQSIDFKQVLHSWFR | |
| | | | QPQSNWGIEINAFDPSGTDLAVTSLGPGAEGLHPF | |
| | | | MELRVLENTKRSRRGLECDGKVNICCKKQFFVSF | |
| | | | KDIGWNDWIIAPSGYHANYCEGECPSHIAGTSGSS | |
| | | | LSFHSTVINHYRMRGHSPFANLKSCCVPTKLRPMS | |
| | | | MLYYDDGQNIIKKDIQNMIVEECGCS | |
| Inhibin | GDF-11 | Inhibin | SPTPGSEGHSAAPDCPSCALAALPKDVPNSQPEM | 288 |
| Beta A | (87-274) | Beta A | VEAVKKHILNMLHLKKRPDVTQPVPKAALLQQIL | |
| (1-64) | | (291-406) | DLHDFQGDALQPEDFLEEDEYHATTETVISMAQE | |
| | | | TDPAVQTDGSPLCCHFHFSPKVMFTKVLKAQLW | |
| | | | VYLRPVPRPATVYLQILRLKPLTGEGTAGGGGGG | |
| | | | RRHIRIRSLKIELHSRSGHWQSIDFKQVLHSWFRQ | |
| | | | PQSNWGIEINAFDPSGTDLAVTSLGPGAEGLHPFM | |
| | | | ELRVLENTKRSRRGLECDGKVNICCKKQFFVSFK | |
| | | | DIGWNDWIIAPSGYHANYCEGECPSHIAGTSGSSL | |
| | | | SFHSTVINHYRMRGHSPFANLKSCCVPTKLRPMS | |
| | | | MLYYDDGQNIIKKDIQNMIVEECGCS | |
| Inhibin | GDF-11 | N/A | SPTPGSEGHSAAPDCPSCALAALPKDVPNSQPEM | 289 |
| Beta A | (97-274) | | VEAVKKHILNMLHLKKRPDVTQPVPKAALLNAIR | |
| (1-76) | | | KLHVGKVGGDALQPEDFLEEDEYHATTETVISMA | |
| | | | QETDPAVQTDGSPLCCHFHFSPKVMFTKVLKAQL | |
| | | | WVYLRPVPRPATVYLQILRLKPLTGEGTAGGGGG | |
| | | | GRRHIRIRSLKIELHSRSGHWQSIDFKQVLHSWFR | |
| | | | QPQSNWGIEINAFDPSGTDLAVTSLGPGAEGLHPF | |
| | | | MELRVLENTKRSRR | |
| Inhibin | GDF-11 | NA | SPTPGSEGHSAAPDCPSCALAALPKDVPNSQPEM | 290 |
| Beta A | (87-274) | | VEAVKKHILNMLHLKKRPDVTQPVPKAALLQQIL | |
| (1-64) | | | DLHDFQGDALQPEDFLEEDEYHATTETVISMAQE | |
| | | | TDPAVQTDGSPLCCHFHFSPKVMFTKVLKAQLW | |
| | | | VYLRPVPRPATVYLQILRLKPLTGEGTAGGGGGG | |
| | | | RRHIRIRSLKIELHSRSGHWQSIDFKQVLHSWFRQ | |
| | | | PQSNWGIEINAFDPSGTDLAVTSLGPGAEGLHPFM | |
| | | | ELRVLENTKRSRR | |

[0104] Chimeric proteins may be used to characterize and/or map epitopes associated with GPCs. As used herein, the terms “map” or “mapping” refer to the identification, characterization and/or determination of one or more functional regions of one or more proteins. Such characterizations may be necessary for determining interactions between one or more protein modules and another agent (e.g. another protein and/or protein module). Some chimeric proteins may be used to characterize functions associated with one or more proteins and/or protein modules.

[0105] In some embodiments, chimeric proteins of the present invention may comprise the sequences listed in Table 16 or fragments thereof. In some cases, these sequences are expressed in association with N- and/or C-terminal secretion signal sequences [e.g. human Ig kappa chains with amino acid sequence MDMRVPAQLLGLLLLWFSGVLG (SEQ ID NO: 99)], flag tag sequences [e.g. DYKDDDDK (SEQ ID NO: 100)], one or more 3C protease cleavage site [e.g. LEVLFQGP (SEQ ID NO: 101)], one or more biotinylation site and/or His-tag sequences [e.g. HHHHHH (SEQ ID NO: 102)].

TABLE 16
Chimeric proteins

| | | SEQ |
|---|---|---|
| | | ID |
| Protein | Sequence | NO |
| proTGF-β1 ARMβ3 C4S | LSTSKTIDMELVKRKRIEAIRGQILSKLRLASPPSQGEVP | 291 |
| | PGPLPEAVLALYNSTRDRVAGESAEPEPEPEADYYAKE | |
| | IHKFDMIQGLAEHNELAVCPKGITSKVFRFNVSSVEKN | |
| | RTNLFRAEFRVLRVPNPSSKRNEQRIELFQILRPDEHIA | |
| | KQRYIGGKNLPTRGTAEWLSFDVTDTVREWLLRRESN | |
| | LGLEISIHCPCHTFQPNGDILENIHEVMEIKFKGVDNED | |
| | DHGRGDLGRLKKQKDHHNPHLILMMIPPHRLDNPGQG | |
| | GQRKKRALDTNYCFSSTEKNCCVRQLYIDFRKDLGWK | |
| | WIHEPKGYHANFCLGPCPYIWSLDTQYSKVLALYNQH | |
| | NPGASAAPCCVPQALEPLPIVYYVGRKPKVEQLSNMIV | |
| | RSCKCS | |
| proTGF-β1 Trigger Loop | LSTSKTIDMELVKRKRIEAIRGQILSKLRLASPPSQGEVP | 292 |
| (short) β2 C4S | PGPLPEAVLALYNSTRDRVAGESAEPEPEPEADYYAKE | |
| | VTRVLMVETHNEIYDKFKQSTHSIYMFFNTSELREAVP | |
| | EPVLLSRAELRLLRLKLKVEQHVELYQKYSNNSWRYL | |
| | SNRLLAPSDSPEWLSFDVTGVVRQWLSRGGEIEGFRLS | |
| | AHCSCDSRDNTLQVDINGFTGTSTYTSGDQKTIKSTRK | |
| | KHGMNRPFLLLMATPLERAQHLQSSRHRRALDTNYCF | |
| | SSTEKNCCVRQLYIDFRKDLGWKWIHEPKGYHANFCL | |
| | GPCPYIWSLDTQYSKVLALYNQHNPGASAAPCCVPQA | |
| | LEPLPIVYYVGRKPKVEQLSNMIVRSCKCS | |
| proTGF-β3 ARMβ1 C7S | SLSLSTSTTLDFGHIKKKRVEAIRGQILSKLRLTSPPEPT | 293 |
| | VMTHVPYQVLALYNSTRELLEEMHGEREEGCTQENTE | |
| | SEYYAKEVTRVLMVETHNEIYDKFKQSTHSIYMFFNTS | |
| | ELREAVPEPVLLSRAELRLLRLKLKVEQHVELYQKYSN | |
| | NSWRYLSNRLLAPSDSPEWLSFDVTGVVRQWLSRGGE | |
| | IEGFRLSAHCSCDSRDNTLQVDINGFTTGRRGDLATIHG | |
| | MNRPFLLLMATPLERAQHLQSSRHRRALDTNYCFRNL | |
| | EENCCVRPLYIDFRQDLGWKWVHEPKGYYANFCSGPC | |
| | PYLRSADTTHSTVLGLYNTLNPEASASPCCVPQDLEPL | |
| | TILYYVGRTPKVEQLSNMVVKSCKCS | |
| TGF-β1 ARMβ3 C4S | LSTSKTIDMELVKRKRIEAIRGQILSKLRLASPPSQGEVP | 294 |
| (LAP) | PGPLPEAVLALYNSTRDRVAGESAEPEPEPEADYYAKE | |
| | IHKFDMIQGLAEHNELAVCPKGITSKVFRFNVSSVEKN | |
| | RTNLFRAEFRVLRVPNPSSKRNEQRIELFQILRPDEHIA | |
| | KQRYIGGKNLPTRGTAEWLSFDVTDTVREWLLRRESN | |
| | LGLEISIHCPCHTFQPNGDILENIHEVMEIKFKGVDNED | |
| | DHGRGDLGRLKKQKDHHNPHLILMMIPPHRLDNPGQG | |
| | GQRKKR | |
| TGF-β3 ARMβ1 C7S | SLSLSTSTTLDFGHIKKKRVEAIRGQILSKLRLTSPPEPT | 295 |
| (LAP) | VMTHVPYQVLALYNSTRELLEEMHGEREEGCTQENTE | |
| | SEYYAKEVTRVLMVETHNEIYDKFKQSTHSIYMFFNTS | |
| | ELREAVPEPVLLSRAELRLLRLKLKVEQHVELYQKYSN | |
| | NSWRYLSNRLLAPSDSPEWLSFDVTGVVRQWLSRGGE | |
| | IEGFRLSAHCSCDSRDNTLQVDINGFTTGRRGDLATIHG | |
| | MNRPFLLLMATPLERAQHLQSSRHRR | |
| TGF-β1 Trigger Loop | LSTSKTIDMELVKRKRIEAIRGQILSKLRLASPPSQGEVP | 296 |
| (short) β2 C4S (LAP) | PGPLPEAVLALYNSTRDRVAGESAEPEPEPEADYYAKE | |
| | VTRVLMVETHNEIYDKFKQSTHSIYMFFNTSELREAVP | |
| | EPVLLSRAELRLLRLKLKVEQHVELYQKYSNNSWRYL | |
| | SNRLLAPSDSPEWLSFDVTGVVRQWLSRGGEIEGFRLS | |
| | AHCSCDSRDNTLQVDINGFTGTSTYTSGDQKTIKSTRK | |
| | KHGMNRPFLLLMATPLERAQHLQSSRHRR | |

[0106] In some embodiments, chimeric LAP proteins of the present invention may comprise the sequences listed in the Table below or fragments thereof. In some cases, these sequences are expressed in association with N- and/or C-terminal secretion signal sequences [e.g. human Ig kappa chains with amino acid sequence MDMRVPAQLLGLLLLWFSGVLG (SEQ ID NO: 99)], flag tag sequences [e.g. DYKDDDDK (SEQ ID NO: 100)], one or more 3C protease cleavage site [e.g. LEVLFQGP (SEQ ID NO: 101)], one or more biotinylation site and/or His-tag sequences [e.g. HHHHHH (SEQ ID NO: 102)].

TABLE 17
Chimeric proteins

| | | SEQ |
|---|---|---|
| | | ID |
| Protein | Sequence | NO |
| TGF-β1 ARMβ3 #2 LAP | LSTSKTIDMELVKRKRIEAIRGQILSKLRLASPPSQGEVP | 297 |
| C4S | PGPLPYQVLALYNSTRELLEEMHGEREEGCTQENTESE | |
| | YYAKEIHKFDMIQGLAEHNELAVCPKGITSKVFRFNVS | |
| | SVEKNRTNLFRAEFRVLRVPNPSSKRNEQRIELFQILRP | |
| | DEHIAKQRYIGGKNLPTRGTAEWLSFDVTDTVREWLL | |
| | RRESNLGLEISIHCPCHTFQPNGDILENIHEVMEIKFKGV | |
| | DNEDDHGRGDLGRLKKQKDHHNPHLILMMIPPHRLDN | |
| | PGQGGQRKKR | |
| TGF-β1 ARMβ2 #2 LAP | LSTSKTIDMELVKRKRIEAIRGQILSKLRLASPPSQGEVP | 298 |
| C4S | PGPLPPEVISIYNSTRDLLQEKASRRAAACERERSDEEY | |
| | YAKEVYKIDMPPFFPSENAIPPTFYRPYFRIVRFDVSAM | |
| | EKNASNLVKAEFRVFRLQNPKARVPEQRIELYQILKSK | |
| | DLTSPTQRYIDSKVVKTRAEGEWLSFDVTDAVHEWLH | |
| | HKDRNLGFKISLHCPCCTFVPSNNYIIPNKSEELEARFA | |
| | GIDGTSTYTSGDQKTIKSTRKKNSGKTPHLLLMLLPSY | |
| | RLESQQTNRRKKR | |
| TGF-β1 ARMβ3 #3 LAP | LSTSKTIDMELVKRKRIEAIRGQILSKLRLASPPSQGEVP | 299 |
| C4S | PGPLPEAVLALYNSTRELLEEMHGEREEGCTQENTESE | |
| | YYAKEIHKFDMIQGLAEHNELAVCPKGITSKVFRFNVS | |
| | SVEKNRTNLFRAEFRVLRVPNPSSKRNEQRIELFQILRP | |
| | DEHIAKQRYIGGKNLPTRGTAEWLSFDVTDTVREWLL | |
| | RRESNLGLEISIHCPCHTFQPNGDILENIHEVMEIKFKGV | |
| | DNEDDHGRGDLGRLKKQKDHHNPHLILMMIPPHRLDN | |
| | PGQGGQRKKR | |
| TGF-β1 ARMβ2 #3 LAP | LSTSKTIDMELVKRKRIEAIRGQILSKLRLASPPSQGEVP | 300 |
| C4S | PGPLPEAVISIYNSTRDLLQEKASRRAAACERERSDEEY | |
| | YAKEVYKIDMPPFFPSENAIPPTFYRPYFRIVRFDVSAM | |
| | EKNASNLVKAEFRVFRLQNPKARVPEQRIELYQILKSK | |
| | DLTSPTQRYIDSKVVKTRAEGEWLSFDVTDAVHEWLH | |
| | HKDRNLGFKISLHCPCCTFVPSNNYIIPNKSEELEARFA | |
| | GIDGTSTYTSGDQKTIKSTRKKNSGKTPHLLLMLLPSY | |
| | RLESQQTNRRKKR | |
| TGF-β3 ARMβ1 #3 LAP | SLSLSTSTTLDFGHIKKKRVEAIRGQILSKLRLTSPPEPT | 301 |
| C7S | VMTHVPYQVLALYNSTRDRVAGESAEPEPEPEADYYA | |
| | KEVTRVLMVETHNEIYDKFKQSTHSIYMFFNTSELREA | |
| | VPEPVLLSRAELRLLRLKLKVEQHVELYQKYSNNSWR | |
| | YLSNRLLAPSDSPEWLSFDVTGVVRQWLSRGGEIEGFR | |
| | LSAHCSCDSRDNTLQVDINGFTTGRRGDLATIHGMNRP | |
| | FLLLMATPLERAQHLQSSRHRR | |
| TGF-β3 ARMβ2 #3 LAP | SLSLSTSTTLDFGHIKKKRVEAIRGQILSKLRLTSPPEPT | 302 |
| C7S | VMTHVPYQVISIYNSTRDLLQEKASRRAAACERERSDE | |
| | EYYAKEVYKIDMPPFFPSENAIPPTFYRPYFRIVRFDVS | |
| | AMEKNASNLVKAEFRVFRLQNPKARVPEQRIELYQILK | |
| | SKDLTSPTQRYIDSKVVKTRAEGEWLSFDVTDAVHEW | |
| | LHHKDRNLGFKISLHCPCCTFVPSNNYIIPNKSEELEAR | |
| | FAGIDGTSTYTSGDQKTIKSTRKKNSGKTPHLLLMLLPS | |
| | YRLESQQTNRRKKR | |
| TGF-β2 ARMβ1 #3 LAP | SLSTSSTLDMDQFMRKRIEAIRGQILSKLKLTSPPEDYP | 303 |
| C5S | EPEEVPPEVLALYNSTRDRVAGESAEPEPEPEADYYAK | |
| | EVTRVLMVETHNEIYDKFKQSTHSIYMFFNTSELREAV | |
| | PEPVLLSRAELRLLRLKLKVEQHVELYQKYSNNSWRY | |
| | LSNRLLAPSDSPEWLSFDVTGVVRQWLSRGGEIEGFRL | |
| | SAHCSCDSRDNTLQVDINGFTTGRRGDLATIHGMNRPF | |
| | LLLMATPLERAQHLQSSRHRR | |
| TGF-β2 ARMβ3 #3 LAP | SLSTSSTLDMDQFMRKRIEAIRGQILSKLKLTSPPEDYP | 304 |
| C5S | EPEEVPPEVLALYNSTRELLEEMHGEREEGCTQENTES | |
| | EYYAKEIHKFDMIQGLAEHNELAVCPKGITSKVFRFNV | |
| | SSVEKNRTNLFRAEFRVLRVPNPSSKRNEQRIELFQILR | |
| | PDEHIAKQRYIGGKNLPTRGTAEWLSFDVTDTVREWL | |
| | LRRESNLGLEISIHCPCHTFQPNGDILENIHEVMEIKFKG | |
| | VDNEDDHGRGDLGRLKKQKDHHNPHLILMMIPPHRLD | |
| | NPGQGGQRKKR | |
| TGF-β1 ARMβ2 #4 LAP | LSTSKTIDMELVKRKRIEAIRGQILSKLRLASPPSQGEVP | 305 |
| C4S | PGPLPEAVLALYNSTRDLLQEKASRRAAACERERSDEE | |
| | YYAKEVYKIDMPPFFPSENAIPPTFYRPYFRIVRFDVSA | |
| | MEKNASNLVKAEFRVFRLQNPKARVPEQRIELYQILKS | |
| | KDLTSPTQRYIDSKVVKTRAEGEWLSFDVTDAVHEWL | |
| | HHKDRNLGFKISLHCPCCTFVPSNNYIIPNKSEELEARF | |
| | AGIDGTSTYTSGDQKTIKSTRKKNSGKTPHLLLMLLPS | |
| | YRLESQQTNRRKKR | |
| TGF-β1 ARMβ3 #4 LAP | LSTSKTIDMELVKRKRIEAIRGQILSKLRLASPPSQGEVP | 306 |
| C4S | PGPLPEAVLALYNSTRDLLEEMHGEREEGCTQENTESE | |
| | YYAKEIHKFDMIQGLAEHNELAVCPKGITSKVFRFNVS | |
| | SVEKNRTNLFRAEFRVLRVPNPSSKRNEQRIELFQILRP | |
| | DEHIAKQRYIGGKNLPTRGTAEWLSFDVTDTVREWLL | |
| | RRESNLGLEISIHCPCHTFQPNGDILENIHEVMEIKFKGV | |
| | DNEDDHGRGDLGRLKKQKDHHNPHLILMMIPPHRLDN | |
| | PGQGGQRKKR | |
| TGF-β3 ARMβ1 #4 LAP | SLSLSTSTTLDFGHIKKKRVEAIRGQILSKLRLTSPPEPT | 307 |
| C7S | VMTHVPYQVLALYNSTRERVAGESAEPEPEPEADYYA | |
| | KEVTRVLMVETHNEIYDKFKQSTHSIYMFFNTSELREA | |
| | VPEPVLLSRAELRLLRLKLKVEQHVELYQKYSNNSWR | |
| | YLSNRLLAPSDSPEWLSFDVTGVVRQWLSRGGEIEGFR | |
| | LSAHCSCDSRDNTLQVDINGFTTGRRGDLATIHGMNRP | |
| | FLLLMATPLERAQHLQSSRHRR | |
| TGF-β3 ARMβ2 #4 LAP | SLSLSTSTTLDFGHIKKKRVEAIRGQILSKLRLTSPPEPT | 308 |
| C7S | VMTHVPYQVLALYNSTRELLQEKASRRAAACERERSD | |
| | EEYYAKEVYKIDMPPFFPSENAIPPTFYRPYFRIVRFDV | |
| | SAMEKNASNLVKAEFRVFRLQNPKARVPEQRIELYQIL | |
| | KSKDLTSPTQRYIDSKVVKTRAEGEWLSFDVTDAVHE | |
| | WLHHKDRNLGFKISLHCPCCTFVPSNNYIIPNKSEELEA | |
| | RFAGIDGTSTYTSGDQKTIKSTR | |
| | KKNSGKTPHLLLMLLPSYRLESQQTNRRKKR | |
| TGF-β2 ARMβ1 #4 LAP | SLSTSSTLDMDQFMRKRIEAIRGQILSKLKLTSPPEDYP | 309 |
| C5S | EPEEVPPEVISIYNSTRDRVAGESAEPEPEPEADYYAKE | |
| | VTRVLMVETHNEIYDKFKQSTHSIYMFFNTSELREAVP | |
| | EPVLLSRAELRLLRLKLKVEQHVELYQKYSNNSWRYL | |
| | SNRLLAPSDSPEWLSFDVTGVVRQWLSRGGEIEGFRLS | |
| | AHCSCDSRDNTLQVDINGFTTGRRGDLATIHGMNRPFL | |
| | LLMATPLERAQHLQSSRHRR | |
| TGF-β2 ARMβ3 #4 LAP | SLSTSSTLDMDQFMRKRIEAIRGQILSKLKLTSPPEDYP | 310 |
| C5S | EPEEVPPEVISIYNSTRDLLEEMHGEREEGCTQENTESE | |
| | YYAKEIHKFDMIQGLAEHNELAVCPKGITSKVFRFNVS | |
| | SVEKNRTNLFRAEFRVLRVPNPSSKRNEQRIELFQILRP | |
| | DEHIAKQRYIGGKNLPTRGTAEWLSFDVTDTVREWLL | |
| | RRESNLGLEISIHCPCHTFQPNGDILENIHEVMEIKFKGV | |
| | DNEDDHGRGDLGRLKKQKDHHNPHLILMMIPPHRLDN | |
| | PGQGGQRKKR | |

[0107] In some embodiments, chimeric proteins may comprise one or more protein modules from TGF-β2. Although the crystal structure for the TGF-β2 growth factor has been elucidated (Daopin, S. et al., Crystal structure of transforming growth factor-β2: an unusual fold for the superfamily. Science. 1992. 257(5068):369-73), activation mechanisms remain to be fully understood. Activation may be dependent upon one or more interactions between the TGF-β2 trigger loop and α₉β₁ integrin. The TGF-β2 trigger loop may comprise similar structural and/or functional features associated with RGD sequences. TGF-β2 trigger loops may bind integrins, including, but not limited to α₉β₁ integrins.

[0108] According to mouse tissue staining, integrin subunit α9 is widely expressed in skeletal and cardiac muscle, visceral smooth muscle, hepatocytes, airway epithelium, squamous epithelium, choroid plexus epithelium and also on neutrophils (Palmer, E. L. et al., Sequence and tissue distribution of the integrin α₉ subunit, a novel partner of β1 that is widely distributed in epithelia and muscle. Journal of Cell Biology. 1993. 123(5):1289-97). Expression of α₉ is not detected earlier than E12.5, suggesting that it does not play a major role in the earliest tissue morphogenesis (Wang, A. et al., Expression of the integrin subunit α₉ in the murine embryo. Developmental Dynamics. 1995. 204:421-31). In vivo functions of α₉ are unclear. Phenotypes observed in knockout mice suggest a role in lymphatic valve development (Bazigou, E. et al., Integrin-α₉ is required for fibronectin matrix assembly during lymphatic valve morphogenesis. Dev Cell. 2009 August. 17(2):175-86). Reported interaction partners of integrin α₉β₁ include VCAM-1, the third FnIII domain on tenascin C, osteopontin, polydom/SVEP1, VEGF-A and NGF (Yokasaki, Y. et al., Identification of the ligand binding site for the integrin α₉β₁ in the third fibronectin type III repeat of tenascin C. The Journal of Biological Chemistry. 1998. 273(19):11423-8; Marcinkiewicz, C. et al., Inhibitory effects of MLDG-containing heterodimeric disintegrins reveal distinct structural requirements for interaction of the integrin α₉β₁ with VCAM-1, tenascin-C, and osteopontin. JBC. 2000. 275(41):31930-7; Oommen, S. et al., Vacular endothelial growth factor A (VEGF-A) induces endothelial and cancer cell migration through direct binding to integrin α₉β₁. JBC. 2011. 286(2):1083-92; Sato-Nishiuchi, R. et al., Polydom/SVEP1 is a ligand for integrin α₉β₁. JBC. 2012. 287(30):25615-30; Staniszewska, I. et al., Integrin α₉β₁ is a receptor for nerve growth factor and other neurotrophins. Journal of Cell Science. 2007. 121(Pt 4):504-13; Yokosaki, Y. et al., The integrin α₉β₁ binds to a novel recognition sequence (SVVYGLR; SEQ ID NO: 311) in the thrombin-cleaved amino-terminal fragment of osteopontin. JBC. 1999. 274(51):36328-34).

[0109] Binding sites on proteins that interact with α₉β₁ have been mapped using linear peptides. These sites include binding sites on tenascin C (AEIDGIEL; SEQ ID NO: 312), osteopontin (SVVYGLR; SEQ ID NO: 311), polydom/SVEP1 (EDDMMEVPY; SEQ ID NO: 313) and VEGF-A (EYP). Unlike α₄β₁ and α₅β₁, α₉β₁ does not require a canonical RGD sequence motif. Some, but not all reported targets have an acidic residue/hydrophobic residue/proline motif. Some also comprise a tyrosine residue.

[0110] The trigger loop of TGF-β1 and TGF-β3 carries an RGD sequence where αᵥβ₆ and/or αᵥβ₈ bind to enable growth factor release. The TGF-β2 trigger loop region is different from those of TGF-β1 and TGF-β3, comprising the sequence FAGIDGTSTYTSGDQKTIKSTRKKNSGKTP (SEQ ID NO: 66), without an RGD trimer. Of this region, residues AGIDGTST (SEQ ID NO: 314) align with the peptide on the third FnIII domain of tenascin-C that has been mapped as an α₉β₁ binding site. Also, the tyrosine following this region may play a role in potential α₉β₁ binding. Therefore, α₉β₁ binding to TGF-β2 could be physiologically relevant. In some embodiments, chimeric proteins of the present invention may comprise trigger loop sequences comprising any of the sequences listed in Table 18. In some cases, these sequences are expressed in association with N- and/or C-terminal secretion signal sequences [e.g. human Ig kappa chains with amino acid sequence MDMRVPAQLLGLLLLWFSGVLG (SEQ ID NO: 99)], flag tag sequences [e.g. DYKDDDDK (SEQ ID NO: 100)], one or more 3C protease cleavage site [e.g. LEVLFQGP (SEQ ID NO: 101)], one or more biotinylation site and/or His-tag sequences [e.g. HHHHHH (SEQ ID NO: 102)].

TABLE 18
Trigger loop sequences

| | | SEQ |
|---|---|---|
| | | ID |
| Source protein | Trigger loop sequence | NO |
| TGF-β2 | FAGIDGTSTYTSGDQKTIKSTRKKNSGKTP | 66 |
| TGF-β2 | AGIDGTST | 314 |
| TGF-β2 (short) | GTSTYTSGDQKTIKSTRKK | 231 |
| TGF-β1 | INGFTTGRRGDLATIHGMNRP | 315 |
| TGF-β1 | SGRRGDLATI | 316 |
| TGF-β1 | TGRRGDLATI | 317 |
| TGF-β3 | FKGVDNEDDHGRGDLGRLKKQKDHHNP | 318 |
| GDF-8 | PGEDGLNP | 319 |
| GDF-11 | PGAEGLHP | 320 |
| Inhibin A | RPEATP | 321 |
| BMP-9 | SHRKGCDTLDISVPPGSRNLP | 322 |
| BMP-2 | RHVRISRSLHQDEHSWSQIRP | 323 |
| BMP-4 | QHVRISRSLPQGSGNWAQLRP | 324 |
| BMP-7 | IGRHGPQNKQP | 325 |
| BMP-6 | VGRDGPYDKQP | 326 |
| BMP-8 | LGQRAPRSQQP | 327 |
| Lefty 1 | RFASQGAPAGLGEP | 328 |
| osteopontin | SVVYGLR | 311 |
| tenascin C | AEIDGIEL | 312 |
| polydom/SVEP1 | EDDMMEVPY | 313 |
| VEGF-A | EYP | — |

[0111] In some embodiments, chimeric proteins of the present invention may comprise one or more TGF-β2 trigger loops. Such chimeric proteins may exhibit activation (e.g. growth factor release) regulated in a manner similar to that of TGF-β2. Some chimeric proteins of the present invention may comprise TGF-β-related proteins wherein one or more protein modules are substituted with one or more protein modules comprising one or more TGF-β2 trigger loops. Some chimeric proteins comprise TGF-β-related proteins wherein one or more protein modules comprising at least one RGD sequence are substituted with one or more protein modules comprising one or more TGF-β2 trigger loops. In other embodiments, chimeric proteins may comprise TGF-β1 and/or TGF-β3 proteins wherein one or more protein modules comprising at least one RGD sequence are substituted with one or more protein modules comprising one or more TGF-β2 trigger loops. Such chimeric proteins may exhibit TGF-β1 activity.

[0112] In some embodiments, chimeric proteins of the present invention may comprise one or more protein modules from BMPs. Protein modules comprising sequences from BMPs may comprise sequences from any of those BMP modules disclosed in FIG. 8. Chimeric proteins of the present invention comprising one or more BMP protein module may be useful for the development of antibodies and/or assays to study, enhance and/or perturb BMP interactions with other proteins, including, but not limited to RGM proteins.

[0113] Chimeric proteins may comprise detectable labels. Detectable labels may be used to allow for detection and/or isolation of chimeric proteins. Such detectable labels may comprise biotin labels, polyhistidine tags and/or flag tags. Tags may be used to identify and/or isolate tagged proteins. Proteins produced may comprise additional amino acids encoding one or more 3C protease cleavage site. Such sites allow for cleavage at the 3C protease cleavage site upon treatment with 3C protease, including, but not limited to rhinovirus 3C protease. 3C protease cleavage sites may be introduced to allow for removal of detectable labels from chimeric proteins.

### Protein Expression

[0114] In some embodiments, synthesis of recombinant proteins of the present invention may be carried out according to any method known in the art. Some protein synthesis may be carried out in vitro. Some protein synthesis may be carried out using cells. Such cells may be bacterial and/or eukaryotic. In some embodiments, eukaryotic cells may be used for protein synthesis. Some such cells may be mammalian. Some mammalian cells used for protein expression may include, but are not limited to mouse cells, rabbit cells, rat cells, monkey cells, hamster cells and human cells. Such cells may be derived from a cell line. In other embodiments, human cells may be used. In further embodiments, cell lines may include, but are not limited to HEK293 cells, CHO cells, HeLa cells, Sw-480 cells, EL4 T lymphoma cells, TMLC cells, 293T/17 cells, Hs68 cells, CCD1112sk cells, HFF-1 cells, Keloid fibroblasts, A204 cells, L17 RIB cells and C₂C₁₂ cells.

[0115] In some embodiments, 293 cells are used for synthesis of recombinant proteins of the present invention. These cells are human cells that post-translationally modify proteins with human-like structures (e.g. glycans). Such cells are easily transfectable and scalable and are able to grow to high densities in suspension culture. 293 cells may include 293E cells. 293E cells are HEK293 cells stably expressing EBNA1 (Epstein-Barr virus nuclear antigen-1). In some cases, 293E cells may be grown in serum-free medium to simplify down-stream purification. In some cases, 293-6E cells (NRC Canada, Ottawa, CA) may be used. Such cells express truncated EBNA1 (EBNAlt) and may comprise enhanced production of recombinant proteins and may be optimized for growth and/or protein expression in serum-free medium to simplify down-stream purification. In some cases, insect cells may be used to express recombinant proteins of the invention. In some cases, insect cell expression may be carried out using Spodoptera frugiperda cells including, but not limited to Sf9 and/or Sf-21 cells. In some cases, insect cell cultures may comprise Trichoplusia ni cells, including, but not limited to Tn-368 and/or HIGH-FIVE™ BTI-TN-5B1-4 cells. A further list of exemplary insect cell lines can be found in U.S. Pat. No. 5,024,947, the contents of which are herein incorporated by reference in their entirety.

[0116] In some embodiments, recombinant proteins of the invention may comprise an antibody Fc domain to create an Fc fusion protein. The formation of an Fc fusion protein with any of the recombinant proteins described herein may be carried out according to any method known in the art, including as described in Czajkowsky, D. M. et al., 2012. EMBO Mol Med. 4(10):1015-28 and U.S. Pat. Nos. 5,116,964, 5,541,087 and 8,637,637, the contents of each of which are herein incorporated by reference in their entirety. In some cases, proteins that may be difficult to express may be expressed as Fc fusion proteins to enhance protein stability and allow for expression and, in some cases, subsequent use as antigens. Fc fusion proteins of the invention may be linked to the hinge region of an IgG Fc via cysteine residues in the Fc hinge region. Resulting Fc fusion proteins may comprise an antibody-like structure, but without C_{H1} domains or light chains. In some cases, Fc fusion proteins may comprise pharmacokinetic profiles comparable to native antibodies. In some cases, Fc fusion proteins of the invention may comprise an extended half-life in circulation and/or altered biological activity. In some cases, Fc fusion proteins of the invention may be prepared using any of the TGF-β family proteins or TGF-β-related proteins described herein. In some cases, Fc fusion proteins may comprise TGF-β, GDF-8 and/or GDF-11.

[0117] In some embodiments, Fc domains may comprise the amino acid sequence DKTHTCPPCPAPELLGGPSVFLFPPKPKDTLMISRTPEVTCVVVDVSHEDPEVKFNWYV DGVEVHNAKTKPREEQYNSTYRVVSVLTVLHQDWLNGKEYKCKVSNKALPAPIEKTIS KAKGQPREPQVYTLPPSREEMTKNQVSLTCLVKGFYPSDIAVEWESNGQPENNYKTTPP VLDSDGSFFLYSKLTVDKSRWQQGNVFSCSVMHEALHNHYTQKSLSLSPGK (SEQ ID NO: 329).

[0118] Sequences encoding recombinant proteins of the present invention may be inserted into any number of DNA vectors known in the art for expression. Such vectors may include plasmids. In some embodiments, sequences encoding recombinant proteins of the present invention are cloned into pTT5 vectors (NRC Biotechnology Research Institute, Montréal, Québec). In other embodiments pTT22, pTT28, pYD5, pYD7, pYD11 (NRC Biotechnology Institute, Montréal, Québec) and/or pMA vectors (Life Technologies, Carlsbad, Calif.) may be used. Vectors may comprise promoter sequences to modulate expression of sequences encoding recombinant proteins of the present invention. Such promoters may be constitutively active and/or may be regulated by extrinsic and/or intrinsic factors. Some extrinsic factors may be used to enhance or suppress expression of sequences encoding recombinant proteins of the present invention. Some vectors may encode nuclear localization signals that may be incorporated into recombinant proteins of the present invention upon translation. Some vectors may produce mRNA transcripts that comprise nuclear export signals. RNA transcribed from a modified pTT5 vector (pTT5-WPRE) contains an element that facilitates nuclear export of the transcripts. Some vectors may be modified by insertion of one or more ligation-independent cloning (LIC) cassettes to provide for simpler cloning.

[0119] Vectors encoding recombinant proteins of the present invention may be delivered to cells according to any method known in the art, including, but not limited to transfection, electroporation and/or transduction. In some embodiments, vectors may comprise one or more elements to enhance vector replication in host cells. In some embodiments, vectors may comprise oriP sites for episomal replication in cells that express EBNA-1.

[0120] In some cases, cells are stably transfected to produce recombinant proteins of the present invention. Stably transfected cells pass transfected genes to daughter cells during cell division, thus eliminating the need for repeated transfection. In some cases, the transfected genes are stably inserted into the genome of the transfected cells. Transfected genes may comprise genes for cell selection, such as genes that confer resistance to one or more toxic or repressive compounds. Such genes may be used to support the growth of only cells with stable incorporation of the transfected genes when grown in the presence of such one or more toxic or repressive compounds (e.g. puromycin, kanamycin, etc.). Cell selection may also comprise selecting cells based on overall recombinant protein expression levels. Determination of such levels may be carried out, for example, by Western Blot and/or ELISA.

[0121] In some embodiments, nucleotide sequences encoding recombinant proteins of the present invention may comprise one or more woodchuck hepatitis virus posttranscriptional regulatory element (WPRE). RNA nucleic acids comprising such elements may comprise the sequence

GCCACGGCGGAACUCAUCGCCGCCUGCCUUGCCCGCUGCUGGACAGGGGCUCGGC UGUUGGGCACUGACAAUUCCGUGGU (SEQ ID NO: 330). RNA comprising WPREs may be transcribed from DNA comprising the sequence
AATCAACCTCTGGATTACAAAATTTGTGAAAGATTGACTGGTATTCTTAACTATGTT GCTCCTTTTACGCTATGTGGATACGCTGCTTTAATGCCTTTGTATCATGCTATTGCTT CCCGTATGGCTTTCATTTTCTCCTCCTTGTATAAATCCTGGTTGCTGTCTCTTTATGAG GAGTTGTGGCCCGTTGTCAGGCAACGTGGCGTGGTGTGCACTGTGTTTGCTGACGCA ACCCCCACTGGTTGGGGCATTGCCACCACCTGTCAGCTCCTTTCCGGGACTTTCGCTT TCCCCCTCCCTATTGCCACGGCGGAACTCATCGCCGCCTGCCTTGCCCGCTGCTGGA CAGGGGCTCGGCTGTTGGGCACTGACAATTCCGTGGTGTTGTCGGGGAAGCTGACGT CCTTTCCATGGCTGCTCGCCTGTGTTGCCACCTGGATTCTGCGCGGGACGTCCTTCTG CTACGTCCCTTCGGCCCTCAATCCAGCGGACCTTCCTTCCCGCGGCCTGCTGCCGGCT CTGCGGCCTCTTCCGCGTCTTCGCCTTCGCCCTCAGACGAGTCGGATCTCCCTTTGGG CCGCCTCCCCGCCTG (SEQ ID NO: 331). WPREs may enhance translation of nucleic acids comprising WPREs. Such enhanced translation may be due to increased cytoplasmic export of newly transcribed mRNA.

[0122] In some embodiments, recombinant proteins may comprise one or more secretion signal sequences. As used herein, the term “secretion signal sequence” refers to a chain of amino acids (or nucleotides that encode them at the nucleic acid level) that when part of a protein, modulate secretion of such proteins from cells. Some secretion signal sequences may be located at protein termini. In other embodiments, secretion signal sequences may be N-terminal amino acid sequences. Other secretions signal sequences may comprise the secretion signal of the Ig kappa chains. Such Ig kappa chains may be human Ig kappa chains. In some embodiments, secretion signal sequences may comprise the amino acid sequence MDMRVPAQLLGLLLLWFSGVLG (SEQ ID NO: 99).

[0123] In some embodiments, recombinant proteins of the present invention may require coexpression with one or more other proteins for proper expression, folding, secretion, activity and/or function. Some recombinant GPCs of the present invention may be coexpressed with LTBPs, fibrillins and/or GARP.

[0124] In some embodiments, recombinant proteins of the present invention may be biotinylated. As used herein, the term “biotinylating” refers to the attaching of one or more biotin labels. Such biotin labels may facilitate interactions of biotinylated recombinant proteins with avidin and/or streptavidin coated surfaces and/or proteins. As used herein, a “biotin label” refers to a detectable label comprising one or more biotin molecules. The term “biotinylated” refers to a molecule or protein that comprises one or more biotin labels. Biotin molecules bind with high affinity to avidin and streptavidin molecules. This property may be used to capture biotinylated proteins using avidin and/or stretavidin coated materials. Some recombinant GPCs of the present invention may be biotinylated near the N-terminus. Such recombinant GPCs may be introduced to avidin/streptavidin coated cell culture surfaces, allowing biotinylated recombinant GPCs to adhere to the surface in a manner such that the orientation and bonding of such bound GPCs mimics the orientation and bonding of GPCs to LTBPs, fibrillins and/or GARPs.

[0125] In some embodiments, recombinant proteins produced may be analyzed for quality control purposes to assess both biophysical properties as well as bioactive properties. Biophysical characterization may include assessing protein migration patterns after reducing and/or non-reducing SDS PAGE. Biophysical characterization may also comprise gel filtration, mass spectrometric analysis and/or analysis of association/dissociation between LAPs or LAP-like domains and growth factor domains. Bioactive properties may be analyzed by assessing reactivity with antibodies and/or signaling activity of dissociated growth factors and/or latent GPCs.

[0126] Some proteins produced may comprise additional amino acids encoding one or more detectable labels for purification [e.g. polyhistidine tag, flag tag, etc.] In some embodiments, proteins are N-terminally labeled. In some embodiments, proteins are C-terminally labeled. In some embodiments, proteins are biotinylated. In some embodiments, recombinant proteins of the present invention are N-terminally biotinylated.

[0127] Proteins produced may comprise additional amino acids encoding one or more 3C protease cleavage site. Such sites allow for cleavage between residues Q and G of the 3C protease cleavage site upon treatment with 3C protease, including, but not limited to rhinovirus 3C protease. In some embodiments, such cleavage sites are introduced to allow for removal of detectable labels from recombinant proteins.

[0128] In some embodiments, modification of expressed growth factor proproteins may be carried out by enzymatic cleavage. In some cases, proprotein convertases may be used. Such proprotein convertases may include, but are not limited to furin/PACE3, PC1/3, PC2, PC4, PC5/6, PACE4 and PC7. Proprotein convertase cleavage may be carried out in solution or in tissue culture. In some cases, proprotein convertases are expressed in cells expressing proproteins to be cleaved. In some cases, proprotein convertases are added to tissue cultures of cells expressing proproteins to be cleaved.

### Antibodies

[0129] In some embodiments, compounds and/or compositions of the present invention may comprise antibodies or fragments thereof. As used herein, the term “antibody” is referred to in the broadest sense and specifically covers various embodiments including, but not limited to monoclonal antibodies, polyclonal antibodies, multispecific antibodies (e.g. bispecific antibodies formed from at least two intact antibodies), and antibody fragments such as diabodies so long as they exhibit a desired biological activity. Antibodies are primarily amino-acid based molecules but may also comprise one or more modifications (including, but not limited to the addition of sugar moieties, fluorescent moieties, chemical tags, etc.).

### Recombinant and Chimeric Protein Use in Antibody Generation

[0130] In some embodiments, recombinant and/or chimeric proteins described herein may be used as antigens (referred to herein as antigenic proteins) to generate antibodies. Such antigenic proteins may comprise epitopes that may be less accessible for antibody generation in similar wild type proteins. Some antibodies directed to antigenic proteins of the present invention may modulate the release of one or more growth factors from one or more GPCs). Some such antibodies may be stabilizing [reducing or preventing dissociation between two agents, (e.g. growth-factor release from GPCs, GPC release from one or more protein interactions)] and/or releasing [enhancing the dissociation between two agents (e.g. growth-factor release from GPCs, GPC release from one or more protein interactions)] antibodies. Antigenic proteins of the present invention may comprise TGF-β-related proteins as well as components and/or protein modules thereof. In some cases, antigenic proteins of the present invention may comprise prodomains without associated growth factors, furin cleavage-deficient mutants, mutants deficient in extracellular protein associations and/or combinations thereof.

[0131] In some embodiments, antigenic proteins may comprise TGF-β-related proteins and/or modules thereof. Such antigenic proteins may comprise epitopes from regions where growth factors associate with or comprise stereological proximity with prodomain regions. Antibodies of the present invention directed to such epitopes may bind overlapping regions between growth factors and prodomains. Such antibodies may stereologically inhibit the dissociation of growth factors from GPCs.

[0132] In some embodiments, antigenic proteins comprise only the prodomain or only the growth factor from a particular GPC. Epitopes present on such antigenic proteins may be shielded or unexposed in intact GPCs. Some antibodies of the present invention may be directed to such epitopes. Such antibodies may be releasing antibodies, promoting growth factor dissociation from GPCs. Further antibodies may compete with free growth factor for prodomain binding, thereby promoting growth factor dissociation from GPCs.

[0133] In some embodiments, antigenic proteins may comprise proprotein convertase (e.g. furin) cleavage site mutations. Such mutations may prevent enzymatic cleavage of growth factors from their prodomains. Some antibodies of the present invention may be directed to epitopes present on such mutant proteins. Such antibodies may stabilize the association between prodomains and growth factors. In some embodiments, furin cleavage site mutants comprise D2G mutants as described herein.

[0134] In some embodiments, antigenic proteins comprising prodomains may comprise N-terminal mutations that lead to decreased prodomain association with LTBPs and/or GARP and therefore may present epitopes in the N-terminal region that may otherwise be shielded by those associations. Some antibodies of the present invention may be directed to such epitopes. Some antigenic proteins comprising TGF-β1 prodomains may comprise C4S mutations. Such mutations may prevent association of antigenic proteins with LTBPs and/or GARP, making these proteins useful for presenting N-terminal epitopes. Antibodies directed to C4S mutants may prevent GPC association with LTBPs and/or GARP. Some antibodies directed to C4S mutants may reduce growth factor signaling in a particular niche. Some such antibodies may reduce or prevent the release of growth factor by blocking the ability of the GPCs to associate securely with the extracellular matrix.

[0135] In some embodiments, antigenic proteins may comprise one or more recombinant LTBP. Such recombinant LTBPs may comprise LTBP1, LTBP2, LTBP3, LTBP4, alternatively spliced variants and/or fragments thereof. Recombinant LTBPs may also be modified to comprise one or more detectable labels. Such detectable labels may include, but are not limited to biotin labels, polyhistidine tags, myc tags, HA tags and/or fluorescent tags.

[0136] In some embodiments, antigenic proteins may comprise one or more recombinant protein and/or chimeric protein complexed with one or more recombinant LTBP. Some antigenic proteins may comprise proprotein convertase cleavage site mutants (e.g. D2G mutants, AXXA mutants) complexed with one or more recombinant LTBP. Some such recombinant LTBPs may comprise LTBP1S. Some recombinant LTBPs may comprise one or more detectable labels, including, but not limited to biotin labels, polyhistidine tags and/or flag tags.

[0137] In some embodiments, antigenic proteins may comprise GARP (or homologues thereof, including, but not limited to LRRC33). Such GARP may be recombinant, referred to herein as recombinant GARP. Some recombinant GARPs may comprise one or more modifications, truncations and/or mutations as compared to wild type GARP. Recombinant GARPs may be modified to be soluble. In other embodiments, recombinant GARPs are modified to comprise one or more detectable labels. In further embodiments, such detectable labels may include, but are not limited to biotin labels, polyhistidine tags, flag tags, myc tags, HA tags and/or fluorescent tags. In some embodiments, antigenic proteins may comprise one or more recombinant protein and/or chimeric protein complexed with one or more recombinant GARP. In some embodiments, antigenic proteins comprise LAPs (e.g. TGF-β LAPs) and/or LAP-like domains complexed with recombinant GARP. In some embodiments, antigenic proteins comprise D2G mutants (e.g. TGF-β D2G mutants) complexed with recombinant GARP. In some embodiments, complexed recombinant GARPs may be soluble forms of GARP (sGARP). In some embodiments, sGARPs comprises one or more biotin labels, polyhistidine tags and/or flag tags.

[0138] In some embodiments, GARPs complexed with LAP and/or LAP-like domains are desired as antigens, in assays and/or for antibody development. In such embodiments, LAPs and/or LAP-like domains may comprise CED mutations. Such LAPs and/or LAP-like domains may be expressed as GPCs to facilitate proper protein folding, conformation and/or expression, but the CED mutations present may enhance growth factor release, leaving the desired GARP-LAP (or LAP-like domain) complex behind. LAP (or LAP-like domain) complexed with GARP may be useful as antigens in the production of releasing antibodies that specifically target GARP-associated GPCs.

[0139] In some embodiments, GPCs comprising CED mutations may act to stabilize a natively populated conformation of LAP (or LAP-like domain) characterized by reduced growth factor association (both as a free LAP or LAP-like domains and/or as a complex with GARP or LTBP), thereby exposing epitopes that may be less exposed in wild-type proteins. Such mutations may shift the conformational equilibrium of LAP or LAP-like domains to facilitate the production of activating antibodies.

[0140] In some embodiments, antigenic proteins of the present invention may comprise one or more protein modules from GDFs (e.g. GDF-11 and/or GDF-8). In some embodiments, antibodies of the present invention may be directed toward antigenic proteins comprising GDF-8 protein modules. In some embodiments, such antibodies may modulate GDF-8 levels and/or activity in one or more niches. In some embodiments, antibodies of the present invention may prevent the release of GDF-8 growth factors from GPCs. In some embodiments, antibodies of the present invention may be used to repair and/or enhance muscle tissues.

[0141] In some embodiments, recombinant proteins (including, but not limited to chimeric proteins) described herein may be used in studies to identify and map epitopes that may be important targets for antibody development. Such studies may be used to identify epitopes that may promote growth factor release or stabilization of GPCs upon antibody binding.

### Releasing Antibodies

[0142] As used herein, the term “releasing antibody” refers to an antibody that increases the ratio of active and/or free growth factor relative to inactive and/or prodomain-associated growth factor upon the introduction of the antibody to a GPC, cell, niche, natural depot or any other site of growth factor sequestration. In this context, releasing antibodies may be characterized as agonists. As used herein, the term “natural depot” refers to a location within a cell, tissue or organ where increased levels of a biomolecule or ion are stored. For example, the extracellular matrix may act as a natural depot for one or more growth factors.

[0143] The contact necessary for growth-factor release may be defined as direct or indirect contact of antibody with a GPC or a component thereof or with a cellular structure such as an extracellular and/or cellular matrix protein and/or protein associated with the extracellular and/or cellular matrix [e.g. LTBPs (e.g. LTBP1, LTBP2, LTBP3 and/or LTBP4), fibrillins (e.g. fibrillin-1, fibrillin-2, fibrillin-3 and/or fibrillin-4), perlecan, decorin, elastin, collagen and/or GARPs (e.g. GARP and/or LRRC33)] for release of growth factor. Release of at least 5%, 10%, 20%, 30%, 40%, 50%, 60%, 70%, 80%, 90% or more of growth factor is sufficient to characterize antibodies of the present invention as releasing antibodies. It is understood that growth factor release after antibody administration may be local and may occur over a sustained period of time and may include peaks or spikes of release. Antibodies of the present invention may act to release one or more growth factor over minutes, hours, days or longer.

[0144] Release profiles may have an initial peak or burst within from about 4 hours to about 7 days of contacting in vivo or shorter periods in vitro. For example, initial peak or burst may occur from about 4 hours to about 5 hours, or from about 4 hours to about 6 hours, or from about 4 hours to about 7 hours, or from about 4 hours to about 8 hours, or from about 4 hours to about 9 hours, or from about 4 hours to about 10 hours, or from about 4 hours to about 11 hours, or from about 4 hours to about 12 hours, or from about 4 hours to about 24 hours, or from about 4 hours to about 36 hours, or from about 4 hours to about 48 hours, or from about 1 day to about 7 days, or from about 1 day to about 2 days, or from about 1 day to about 3 days, or from about 1 day to about 4 days, or from about 4 days to about 5 days, or from about 4 days to about 6 days, or from about 4 days to about 7 days. Compounds and/or compositions of the present invention may stimulate the release of 5 to 100% of the growth factor present. For example, the percent of growth factor release may be from about 5% to about 10%, or from about 5% to about 15%, or from about 5% to about 20%, or from about 5% to about 25%, or from about 10% to about 30%, or from about 10% to about 40%, or from about 10% to about 50%, or from about 10% to about 60%, or from about 20% to about 70%, or from about 20% to about 80%, or from about 40% to about 90%, or from about 40% to about 100%.

[0145] In some embodiments, releasing antibodies of the invention may be characterized according to their half maximal effective concentration (EC₅₀). In some cases, this value may represent the concentration of antibody necessary to produce an increase in growth factor activity equal to half of the maximum amount of activity possible. Such EC₅₀ values may be from about 0.001 nM to about 0.01 nM, from about 0.005 nM to about 0.05 nM, from about 0.01 nM to about 1 nM, from about 0.05 nM to about 5 nM, from about 0.1 nM to about 10 nM, from about 0.5 nM to about 25 nM, from about 1 nM to about 50 nM, from about 5 nM to about 75 nM, from about 10 nM to about 100 nM, from about 25 nM to about 250 nM, from about 200 nM to about 1000 nM or more than 1000 nM.

[0146] Releasing antibodies generated according to methods described herein may be generated to release growth factors from GPCs comprising any of the pro-proteins listed in Table 1. In some cases, releasing antibodies are directed to GPCs comprising TGF-β isoforms and/or one or more modules of such isoforms. In some cases, releasing antibodies are directed to GPCs comprising GDFs and/or one or more modules from GDFs.

### Stabilizing Antibodies

[0147] As used herein, the term “stabilizing antibody” refers to an antibody that decreases the ratio of active and/or free growth factor relative to inactive and/or prodomain-associated growth factor upon the introduction of the antibody to one or more GPC, cell, niche, natural depot and/or any other site of growth factor sequestration. In this context, antibodies may be characterized as antagonists. As used herein, an “antagonist” is one which interferes with or inhibits the physiological action of another. Antagonist action may even result in stimulation or activation of signaling downstream and hence may act agonistically relative to another pathway, separate from the one being antagonized. Pathways are interrelated, so, in one nonlimiting example, a TGF-β antagonist could act as a BMP agonist and vice versa. In the context of cellular events, as used herein, the term “downstream” refers to any signaling or cellular event that happens after the action, binding or targeting by compounds and/or compositions of the present invention.

[0148] Contact necessary for inhibition or stabilization may be direct or indirect contact between antibody and GPC or components thereof or with cellular structures such as an extracellular and/or cellular matrix protein and/or protein associated with the extracellular and/or cellular matrix [e.g. LTBPs (e.g. LTBP1, LTBP2, LTBP3 and/or LTBP4), fibrillins (e.g. fibrillin-1, fibrillin-2, fibrillin-3 and/or fibrillin-4), perlecan, decorin, elastin, collagen and/or GARPs (e.g. GARP and/or LRRC33)] whereby release of growth factor is inhibited. Inhibition of release of at least 5%, 10%, 20%, 30%, 40%, 50%, 60%, 70%, 80%, 90% or more of growth factors may be sufficient, in some cases, to characterize antibodies of the present invention as inhibitory or stabilizing. Inhibitory antibodies may stabilize GPCs and trap them as heterodimers.

[0149] It is understood that inhibition of growth factor release after contact with one or more antibodies of the present invention may be local and may occur over a sustained period of time and may include peaks, troughs or spikes. Inhibitory antibodies which may also function to stabilize GPCs may be defined by their release kinetics. Release of growth factor and corresponding release kinetics, even locally, may be directly measured or inferred by downstream signaling events. In some embodiments, changes in protein or nucleic acid concentrations or phenotypic responses may be indicative of the effects of compounds and/or compositions of the present invention.

[0150] Antibodies of the present invention may act to inhibit release of a growth factor over minutes, hours or days. Inhibition and/or stabilization profiles may have an initial trough within from about 4 hours to about 7 days of introduction in vivo or shorter periods in vitro. For example, initial trough of inhibition or stabilization may occur from about 4 hours to about 5 hours, or from about 4 hours to about 6 hours, or from about 4 hours to about 7 hours, or from about 4 hours to about 8 hours, or from about 4 hours to about 9 hours, or from about 4 hours to about 10 hours, or from about 4 hours to about 11 hours, or from about 4 hours to about 12 hours, or from about 4 hours to about 24 hours, or from about 4 hours to about 36 hours, or from about 4 hours to about 48 hours, or from about 1 day to about 7 days, or from about 1 day to about 2 days, or from about 1 day to about 3 days, or from about 1 day to about 4 days, or from about 4 days to about 5 days, or from about 4 days to about 6 days, or from about 4 days to about 7 days. Introduction of compounds and/or compositions of the present invention may lead to inhibition and/or stabilization of 5% to 100% of growth factor present. For example, the percent of growth factor inhibition or stabilization may be from about 5% to about 10%, from about 5% to about 15%, from about 5% to about 20%, from about 5% to about 25%, from about 10% to about 30%, from about 10% to about 40%, from about 10% to about 50%, from about 10% to about 60%, from about 20% to about 70%, from about 20% to about 80%, from about 40% to about 90% or from about 40% to about 100%.

[0151] In some embodiments, stabilizing antibodies of the invention may be characterized according to their half maximal inhibitory concentration (IC₅₀). In some cases, this value may represent the concentration of antibody necessary to produce a decrease in growth factor activity equal to half of the maximum inhibition observed with the highest concentrations of antibody. Such IC₅₀ values may be from about 0.001 nM to about 0.01 nM, from about 0.005 nM to about 0.05 nM, from about 0.01 nM to about 1 nM, from about 0.05 nM to about 5 nM, from about 0.1 nM to about 10 nM, from about 0.5 nM to about 25 nM, from about 1 nM to about 50 nM, from about 5 nM to about 75 nM, from about 10 nM to about 100 nM, from about 25 nM to about 250 nM, from about 200 nM to about 1000 nM or more than 1000 nM.

[0152] Stabilizing antibodies generated according to methods described herein may be generated to block the release of growth factors from GPCs comprising any of the pro-proteins listed in Table 1. Such antibodies may physically interact with GPC protease cleavage sites and/or block the interaction of proteolytic enzymes that may target such cleavage sites. In some cases, stabilizing antibodies are directed to GPCs comprising TGF-β isoforms and/or one or more modules of such isoforms. In some cases, stabilizing antibodies are directed to GPCs comprising GDFs and/or one or more modules from GDFs.

[0153] Stabilizing antibodies directed to GPCs comprising GDF-8 may block metalloproteinase cleavage of such complexes. Such agents may bind to GPCs comprising GDF-8 in such a way as to physically prevent interactions between such GPCs and metalloproteinases targeting such GPCs. Agents that actually target metalloproteinases themselves have been described previously (see U.S. Pat. No. 7,572,599, the contents of which are herein incorporated by reference in their entirety).

### Antibody Selection

[0154] A desired antibody may be selected from a larger pool of two or more candidate antibodies based on the desired antibody's ability to associate with desired antigens and/or epitopes. Such antigens and/or epitopes may include, but are not limited to any of those described herein, including, but not limited to recombinant proteins, chimeric proteins, GPCs, prodomains (e.g. LAPs or LAP-like domains), growth factors, protein modules, LTBPs, fibrillins, GARP, TGF-β-related proteins and/or mutants and/or variants and/or complexes and/or combinations thereof. Selection of desired antibodies may be carried out using an antibody binding assay, such as a surface Plasmon resonance-based assay, an enzyme-linked immunosorbent assay (ELISA) or fluorescence flow cytometry-based assay. Such assays may utilize a desired antigen to bind a desired antibody and then use one or more detection methods to detect binding.

[0155] In some embodiments, antibodies of the present invention may be selected from a larger pool of two or more candidate antibodies based on their ability to associate with desired antigens and/or epitopes from multiple species (referred to herein as “positive selection.”)

[0156] In some embodiments, such species may comprise vertebrate species. In some embodiments, such species may comprise mammalian species. In some embodiments, such species may include, but are not limited to mice, rats, rabbits, goats, sheep, pigs, horses, cows and/or humans.

[0157] In some embodiments, negative selection is used to remove antibodies from a larger pool of two or more candidate antibodies. As used herein the term “negative selection” refers to the elimination of one or more factors from a group based on their ability to bind to one or more undesired antigens and/or epitopes. In some embodiments, undesired antigens and/or epitopes may include, but are not limited to any of those described herein, including, but not limited to recombinant proteins, chimeric proteins, GPCs, prodomains (e.g. LAPs or LAP-like domains), growth factors, protein modules, LTBPs, fibrillins, GARPs, TGF-β-related proteins and/or mutants and/or variants and/or combinations and/or complexes thereof.

[0158] In some embodiments, antibodies of the present invention may be directed to prodomains (e.g. the prodomain portion of a GPC and/or free LAP or LAP-like domains) that decrease growth factor signaling and/or levels (e.g. TGF-β growth factor signaling and/or levels) in a given niche. In some embodiments, antibodies of the present invention may directed to LAPs or LAP-like domains that increase growth factor signaling and/or levels in a given niche. In some embodiments, antibodies of the present invention may be directed to prodomains (e.g. LAPs or LAP-like domains) and/or GPCs only when complexed with LTBPs, fibrillins and/or GARP.

[0159] In some embodiments, antibodies of the present invention may be selected from a larger pool of two or more candidate antibodies based on their ability to modulate growth factor levels and/or activity. In some cases, growth factor activity assays may be used to test the ability of candidate antibodies to modulate growth factor activity. Growth factor activity assays may include, cell-based assays as described hereinbelow. Additional assays that may be used to determine the effect of candidate antibodies on growth factor activity may include, but are not limited to enzyme-linked immunosorbent assay (ELISA), Western blotting, reporter assays (e.g. luciferase-based reporter assays or other enzyme-based reporter assays), PCR analysis, RT-PCR analysis and/or other methods known in the art including any of the methods described in International Patent Application No. WO2014074532, the contents of which are herein incorporated by reference in their entirety.

[0160] In some embodiments, one or more recombinant proteins or antibodies disclosed herein may be used in assays to test, develop and/or select antibodies. Recombinant GPCs may be expressed to test releasing and/or stabilizing abilities of one or more antibodies being assayed. In some embodiments, recombinant proteins may be expressed as positive or negative control components of assays. In some embodiments, multiple recombinant proteins may be expressed at once to modulate growth factor release and/or activity, wherein such recombinant proteins may act synergistically or antagonistically in such modulation.

[0161] In some embodiments GPCs comprising CED mutations may provide a baseline level of growth factor activity in assays designed to test releasing antibodies, as these mutant proteins are sufficient for producing a biological effect in humans. In some embodiments, GPCs comprising CED mutations may be used as positive controls in activity assays geared toward screening for releasing antibodies. In some embodiments, GPCs comprising CED mutations may be used for screening for stabilizing antibody activity, as they can be presumably activated in the absence of integrins. In such assays, GPCs comprising CED mutations may be expressed in cell lines (e.g. 293 cells or others) and growth factor activity and/or release may be assessed in the presence or absence of antibodies being tested. In some embodiments, co-expression of GPCs comprising CED mutation with wild type GPCs (including, but not limited to TGF-β1, TGF-β2, or TGF-β3) could also be used to regulate free growth factor levels. In such embodiments, modulation of free growth factor levels may accomplished by co-transfection of different ratios of wild type and mutant GPCs (e.g. 1:1, 1:2, 1:3, 1:4, 1:5, 1:10). In some embodiments, further co-expression of LTBPs, fibrillins or GARPs may be carried out to add one or more additional levels of free growth factor modulation.

### Antibody Development

[0162] In some embodiments, compounds and/or compositions of the present invention comprising antibodies, antibody fragments, their variants or derivatives as described above are specifically immunoreactive with antigenic proteins as described herein.

[0163] Antibodies of the present invention may be characterized by their target molecule(s), by the antigens used to generate them, by their function (whether as agonists, antagonists, growth-factor releasing, GPC stabilizing, activating and/or inhibitory) and/or by the cell niche in which they function.

[0164] As used herein the term, “antibody fragment” refers to any portion of an intact antibody. In some embodiments, antibody fragments comprise antigen binding regions from intact antibodies. Examples of antibody fragments may include, but are not limited to Fab, Fab′, F(ab′)₂, and Fv fragments; diabodies; linear antibodies; single-chain antibody molecules; and multispecific antibodies formed from antibody fragments. Papain digestion of antibodies produces two identical antigen-binding fragments, called “Fab” fragments, each with a single antigen-binding site. Also produced is a residual “Fc” fragment, whose name reflects its ability to crystallize readily. Pepsin treatment yields an F(ab′)₂ fragment that has two antigen-binding sites and is still capable of cross-linking antigen. Compounds and/or compositions of the present invention may comprise one or more of these fragments. For the purposes herein, an “antibody” may comprise a heavy and light variable domain as well as an Fc region.

[0165] As used herein, the term “native antibody” refers to a usually heterotetrameric glycoprotein of about 150,000 daltons, composed of two identical light (L) chains and two identical heavy (H) chains. Genes encoding antibody heavy and light chains are known and segments making up each have been well characterized and described (Matsuda, F. et al., 1998. The Journal of Experimental Medicine. 188(11); 2151-62 and Li, A. et al., 2004. Blood. 103(12: 4602-9, the content of each of which are herein incorporated by reference in their entirety). Each light chain is linked to a heavy chain by one covalent disulfide bond, while the number of disulfide linkages varies among the heavy chains of different immunoglobulin isotypes. Each heavy and light chain also has regularly spaced intrachain disulfide bridges. Each heavy chain has at one end a variable domain (V_{H}) followed by a number of constant domains. Each light chain has a variable domain at one end (V_{L}) and a constant domain at its other end; the constant domain of the light chain is aligned with the first constant domain of the heavy chain, and the light chain variable domain is aligned with the variable domain of the heavy chain.

[0166] As used herein, the term “variable domain” refers to specific antibody domains found on both the antibody heavy and light chains that differ extensively in sequence among antibodies and are used in the binding and specificity of each particular antibody for its particular antigen. Variable domains comprise hypervariable regions. As used herein, the term “hypervariable region” refers to a region within a variable domain comprising amino acid residues responsible for antigen binding. The amino acids present within the hypervariable regions determine the structure of the complementarity determining regions (CDRs) that become part of the antigen-binding site of the antibody. As used herein, the term “CDR” refers to a region of an antibody comprising a structure that is complimentary to its target antigen or epitope. Other portions of the variable domain, not interacting with the antigen, are referred to as framework (FW) regions. The antigen-binding site (also known as the antigen combining site or paratope) comprises the amino acid residues necessary to interact with a particular antigen. The exact residues making up the antigen-binding site are typically elucidated by co-crystallography with bound antigen, however computational assessments can also be used based on comparisons with other antibodies (Strohl, W. R. Therapeutic Antibody Engineering. Woodhead Publishing, Philadelphia Pa. 2012. Ch. 3, p 47-54, the contents of which are herein incorporated by reference in their entirety).

[0167] V_{H} and V_{L} domains have three CDRs each. V_{L} CDRs are referred to herein as CDR-L1, CDR-L2 and CDR-L3, in order of occurrence when moving from N- to C-terminus along the variable domain polypeptide. V_{H} CDRs are referred to herein as CDR-H1, CDR-H2 and CDR-H3, in order of occurrence when moving from N- to C-terminus along the variable domain polypeptide. Each of CDRs have favored canonical structures with the exception of the CDR-H3, which comprises amino acid sequences that may be highly variable in sequence and length between antibodies resulting in a variety of three-dimensional structures in antigen-binding domains (Nikoloudis, D. et al., 2014. PeerJ. 2:e456). In some cases, CDR-H3s may be analyzed among a panel of related antibodies to assess antibody diversity. Various methods of determining CDR sequences are known in the art and may be applied to known antibody sequences (Strohl, W. R. Therapeutic Antibody Engineering. Woodhead Publishing, Philadelphia Pa. 2012. Ch. 3, p 47-54, the contents of which are herein incorporated by reference in their entirety).

[0168] As used herein, the term “Fv” refers to an antibody fragment comprising the minimum fragment on an antibody needed to form a complete antigen-binding site. These regions consist of a dimer of one heavy chain and one light chain variable domain in tight, non-covalent association. Fv fragments can be generated by proteolytic cleavage, but are largely unstable. Recombinant methods are known in the art for generating stable Fv fragments, typically through insertion of a flexible linker between the light chain variable domain and the heavy chain variable domain [to form a single chain Fv (scFv)] or through the introduction of a disulfide bridge between heavy and light chain variable domains (Strohl, W. R. Therapeutic Antibody Engineering. Woodhead Publishing, Philadelphia Pa. 2012. Ch. 3, p 46-47, the contents of which are herein incorporated by reference in their entirety).

[0169] As used herein, the term “light chain” refers to a component of an antibody from any vertebrate species assigned to one of two clearly distinct types, called kappa and lambda based on amino acid sequences of constant domains. Depending on the amino acid sequence of the constant domain of their heavy chains, antibodies can be assigned to different classes. There are five major classes of intact antibodies: IgA, IgD, IgE, IgG, and IgM, and several of these may be further divided into subclasses (isotypes), e.g., IgG1, IgG2, IgG3, IgG4, IgA, and IgA2. As used herein, the term “single chain Fv” or “scFv” refers to a fusion protein of V_{H} and V_{L} antibody domains, wherein these domains are linked together into a single polypeptide chain by a flexible peptide linker (typically VH-linker-VL, but VL-linker-VH formats are also contemplated). In some embodiments, the Fv polypeptide linker enables the scFv to form the desired structure for antigen binding.

[0170] As used herein, the term “bispecific antibody” refers to an antibody capable of binding two different antigens. Such antibodies typically comprise regions from at least two different antibodies. Bispecific antibodies may include any of those described in Riethmuller, G. 2012. Cancer Immunity. 12:12-18, Marvin, J. S. et al., 2005. Acta Pharmacologica Sinica. 26(6):649-58 and Schaefer, W. et al., 2011. PNAS. 108(27):11187-92, the contents of each of which are herein incorporated by reference in their entirety.

[0171] As used herein, the term “diabody” refers to a small antibody fragment with two antigen-binding sites. Diabodies comprise a heavy chain variable domain V_{H} connected to a light chain variable domain V_{L} in the same polypeptide chain. By using a linker that is too short to allow pairing between the two domains on the same chain, the domains are forced to pair with the complementary domains of another chain and create two antigen-binding sites. Diabodies are described more fully in, for example, EP 404,097; WO 93/11161; and Hollinger et al. (Hollinger, P. et al., “Diabodies”: Small bivalent and bispecific antibody fragments. PNAS. 1993. 90:6444-8) the contents of each of which are incorporated herein by reference in their entirety.

[0172] As used herein, the term “monoclonal antibody” refers to an antibody obtained from a population of substantially homogeneous cells (or clones), i.e., the individual antibodies comprising the population are identical and/or bind the same epitope, except for possible variants that may arise during production of the monoclonal antibodies, such variants generally being present in minor amounts. In contrast to polyclonal antibody preparations that typically include different antibodies directed against different determinants (epitopes), each monoclonal antibody is directed against a single determinant on the antigen

[0173] The modifier “monoclonal” indicates the character of the antibody as being obtained from a substantially homogeneous population of antibodies, and is not to be construed as requiring production of the antibody by any particular method. The monoclonal antibodies herein include “chimeric” antibodies (immunoglobulins) in which a portion of the heavy and/or light chain is identical with or homologous to corresponding sequences in antibodies derived from a particular species or belonging to a particular antibody class or subclass, while the remainder of the chain(s) is identical with or homologous to corresponding sequences in antibodies derived from another species or belonging to another antibody class or subclass, as well as fragments of such antibodies.

[0174] As used herein, the term “humanized antibody” refers to a chimeric antibody comprising a minimal portion from one or more non-human (e.g., murine) antibody source with the remainder derived from one or more human immunoglobulin sources. For the most part, humanized antibodies are human immunoglobulins (recipient antibody) in which residues from the hypervariable region from an antibody of the recipient are replaced by residues from the hypervariable region from an antibody of a non-human species (donor antibody) such as mouse, rat, rabbit or nonhuman primate having the desired specificity, affinity, and/or capacity.

[0175] In some embodiments, compounds and/or compositions of the present invention may be antibody mimetics. As used herein, the term “antibody mimetic” refers to any molecule which mimics the function or effect of an antibody and which binds specifically and with high affinity to their molecular targets. In some embodiments, antibody mimetics may be monobodies, designed to incorporate the fibronectin type III domain (Fn3) as a protein scaffold (U.S. Pat. No. 6,673,901; U.S. Pat. No. 6,348,584). In some embodiments, antibody mimetics may be those known in the art including, but are not limited to affibody molecules, affilins, affitins, anticalins, avimers, Centyrins, DARPINS™, Fynomers and Kunitz and domain peptides. In other embodiments, antibody mimetics may include one or more non-peptide region.

[0176] As used herein, the term “antibody variant” refers to a biomolecule resembling an antibody in structure and/or function comprising some differences in their amino acid sequence, composition or structure as compared to a native antibody.

[0177] The preparation of antibodies, whether monoclonal or polyclonal, is known in the art. Techniques for the production of antibodies are well known in the art and described, e.g. in Harlow and Lane “Antibodies, A Laboratory Manual”, Cold Spring Harbor Laboratory Press, 1988; Harlow and Lane “Using Antibodies: A Laboratory Manual” Cold Spring Harbor Laboratory Press, 1999 and “Therapeutic Antibody Engineering: Current and Future Advances Driving the Strongest Growth Area in the Pharmaceutical Industry” Woodhead Publishing, 2012.

### Standard Monoclonal Antibody Generation

[0178] In some embodiments, antibodies are generated in knockout mice, lacking the gene that encodes for desired target antigens. Such mice may not be tolerized to target antigens and therefore may be better suited for generating antibodies against such antigens that may cross react with human and mouse forms of the antigen. For the production of monoclonal antibodies, host mice may be immunized with recombinant proteins to elicit lymphocytes that specifically bind such proteins. Resulting lymphocytes may be collected and fused with immortalized cell lines. Resulting hybridoma cells may be cultured in suitable culture medium with selection agents to support the growth of only fused cells.

[0179] Desired hybridoma cell lines may be identified through binding specificity analysis of secreted antibodies for target peptides and clones of such cells may be subcloned through limiting dilution procedures and grown by standard methods. Antibodies produced by subcloned hybridoma cells may be isolated and purified from culture medium by standard immunoglobulin purification procedures

### Recombinant Antibodies

[0180] Recombinant antibodies of the present invention may be generated according to any of the methods disclosed in International Patent Application No. WO2014074532, the contents of which are herein incorporated by reference in their entirety. In some embodiments, recombinant antibodies may be produced using variable domains obtained from hybridoma cell-derived antibodies produced according to methods described herein. Heavy and light chain variable region cDNA sequences of antibodies may be determined using standard biochemical techniques. Total RNA may be extracted from antibody-producing hybridoma cells and converted to cDNA by reverse transcriptase (RT) polymerase chain reaction (PCR). PCR amplification may be carried out on resulting cDNA to amplify variable region genes. Such amplification may comprise the use of primers specific for amplification of heavy and light chain sequences. In other embodiments, recombinant antibodies may be produced using variable domains obtained from other sources. This includes the use of variable domains selected from one or more antibody fragment library, such as an scFv library used in antigen panning. Resulting PCR products may then be subcloned into plasmids for sequence analysis. Once sequenced, antibody coding sequences may be placed into expression vectors. For humanization, coding sequences for human heavy and light chain constant domains may be used to substitute for homologous murine sequences. The resulting constructs may then be transfected into mammalian cells for large scale translation.

### Development of Cytotoxic Antibodies

[0181] In some embodiments, antibodies of the present invention may be capable of inducing antibody-dependent cell-mediated cytotoxicity (ADCC), complement-dependent cytotoxicity (CDC) and/or antibody-dependent cell phagocytosis (ADCP). ADCC is an immune mechanism whereby cells are lysed as a result of immune cell attack. Such immune cells may include CD56+ cells, CD3− natural killer (NK) cells, monocytes and neutrophils (Strohl, W. R. Therapeutic Antibody Engineering. Woodhead Publishing, Philadelphia Pa. 2012. Ch. 8, p 186, the contents of which are herein incorporated by reference in their entirety).

[0182] In some cases, antibodies of the present invention may be engineered to comprise a given isotype depending on whether or not ADCC or ADCP is desired upon antibody binding. Such antibodies, for example, may be engineered according to any of the methods disclosed by Alderson, K. L. et al., J Biomed Biotechnol. 2011. 2011: 379123). In the case of mouse antibodies, different isotypes of antibodies are more effective at promoting ADCC. IgG2a, for example, is more effective at inducing ADCC than is IgG2b. Some antibodies of the present invention, comprising mouse IgG2b antibodies may be reengineered to comprise IgG2a antibodies. Such reengineered antibodies may be more effective at inducing ADCC upon binding cell-associated antigens.

[0183] In some embodiments, genes encoding variable regions of antibodies developed according to methods of the present invention may be cloned into mammalian expression vectors encoding human Fc regions. Such Fc regions may comprise Fc regions from human IgG1κ. IgG1κ Fc regions may comprise amino acid mutations known to enhance Fc-receptor binding and antibody-dependent cell-mediated cytotoxicity ADCC.

[0184] In some cases, antibodies may be engineered to reduce ADCC. Antibodies that do not activate ADCC or that are associated with reduced levels of ADCC may be desireable for antibody embodiments of the present invention, in some cases due to no or limited immune-mediated clearance, allowing longer half-lives in circulation.

### Antibody Fragment Display Library Screening Techniques

[0185] In some embodiments, antibodies of the present invention may be produced and/or optimized using high throughput methods of discovery. Such methods may include any of the display techniques (e.g. display library screening techniques) disclosed in International Patent Application No. WO2014074532, the contents of which are herein incorporated by reference in their entirety. In some embodiments, synthetic antibodies may be designed, selected or optimized by screening target antigens using display technologies (e.g. phage display technologies). Phage display libraries may comprise millions to billions of phage particles, each expressing unique antibody fragments on their viral coats. Such libraries may provide richly diverse resources that may be used to select potentially hundreds of antibody fragments with diverse levels of affinity for one or more antigens of interest (McCafferty, et al., 1990. Nature. 348:552-4; Edwards, B. M. et al., 2003. JMB. 334: 103-18; Schofield, D. et al., 2007. Genome Biol. 8, R254 and Pershad, K. et al., 2010. Protein Engineering Design and Selection. 23:279-88; the contents of each of which are herein incorporated by reference in their entirety). Often, the antibody fragments present in such libraries comprise scFv antibody fragments, comprising a fusion protein of V_{H} and V_{L} antibody domains joined by a flexible linker (e.g. a Ser/Gly-rich linker). These fragments typically comprise the VH domain first, but VL-linker-VH fragments are also contemplated here. In some cases, scFvs may contain the same sequence with the exception of unique sequences encoding variable loops of the complementarity determining regions (CDRs). In some cases, scFvs are expressed as fusion proteins, linked to viral coat proteins (e.g. the N-terminus of the viral pIII coat protein). V_{L} chains may be expressed separately for assembly with V_{H} chains in the periplasm prior to complex incorporation into viral coats.

[0186] Phage selection according to the present invention may include the use of the antibody display library described in Schofield, D. et al., 2007. Genome Biol. 8, R254 and Pershad, K. et al., 2010. Protein Engineering Design and Selection. 23:279-88, the contents of which are herein incorporated by reference in their entirety. This library included over 10¹⁰ clones and has been validated through the successful generation of antibodies to over 300 antigens, producing more than 7,500 distinct antibody clones. Further, antibody production using this library may be carried out as described in Falk, R. et al., 2012. Methods. 58: 69-78 and/or Melidoni et al., 2013. PNAS 110(44): 17802-7, the contents of each of which are herein incorporated by reference in their entirety.

[0187] For selection, target antigens may be incubated, in vitro, with phage display library particles for precipitation of positive binding partners. This process is referred to herein as “phage enrichment.” In some cases, phage enrichment comprises solid-phase phage enrichment. According to such enrichment, target antigens are bound to a substrate (e.g. by passive adsorption) and contacted with one or more solutions comprising phage particles. Phage particles with affinity for such target antigens are precipitated out of solution. In some cases, phage enrichment comprises solution-phase phage enrichment where target antigens are present in a solution that is combined with phage solutions. According to such methods, target antigens may comprise detectable labels (e.g. biotin labels) to facilitate retrieval from solution and recovery of bound phage. In other embodiments, solution-phase phage enrichment may comprise the use of antigens bound to beads (e.g. streptavidin beads). In some cases, such beads may be magnetic beads to facilitate precipitation.

[0188] In some embodiments, phage enrichment may comprise solid-phase enrichment where target antigens are immobilized on solid surface. According to such methods, phage solutions may be used to contact the solid surface for enrichment with the immobilized antigens. Solid surfaces may include any surfaces capable of retaining antigens and may include, but are not limited to dishes, plates, flasks and tubes. In some cases, immunotubes may be used wherein the inner surface of such tubes may be coated with antigens (e.g. by passing biotinylated antigens through streptavidin or neutravidin-coated tubes). Phage enrichment with immunotubes may be carried out by passage of phage solution through the tubes to enrich bound antigens.

[0189] After selection, bound phage may be used to infect E. coli cultures that are co-infected with helper phage, to produce an amplified output library for the next round of enrichment. This process may be repeated producing narrower and narrower clone sets. In some embodiments, rounds of enrichment are limited to improve the diversity of selected phage.

[0190] Precipitated library members may be sequenced from the bound phage to obtain cDNA encoding desired scFvs. Such sequences may be directly incorporated into antibody sequences for recombinant antibody production, or mutated and utilized for further optimization through in vitro affinity maturation.

[0191] IgG antibodies comprising one or more variable domains from selected scFvs may be synthesized for further testing and/or product development. Such antibodies may be produced by insertion of one or more segments of scFv cDNA into expression vectors suited for IgG production. Expression vectors may comprise mammalian expression vectors suitable for IgG expression in mammalian cells. Mammalian expression of IgGs may be carried out to ensure that antibodies produced comprise modifications (e.g. glycosylation) characteristic of mammalian proteins and/or to ensure that antibody preparations lack endotoxin and/or other contaminants that may be present in protein preparations from bacterial expression systems

[0192] In some embodiments, scFvs developed according to the invention may be expressed as scFv-Fc fusion proteins, comprising an antibody Fc domain. Such scFvs may be useful for further screening and analysis of scFv binding and affinity.

[0193] In some cases phage display screening may be used to generate broadly diverse panels of antibodies. Such diversity may be measured by diversity of antibody sequences and/or diversity of epitopes targeted.

[0194] Affinity binding estimates may be made using cross blocking experiments to bin antibodies. In some cases, affinity analysis instruments may be used. Such instruments may include, but are not limited surface plasmon resonance instrumentation, including, but not limited to Octet® (ForteBio, Menlo Park, Calif.).

[0195] In some cases, epitope binning may be carried out to identify groups of antibodies binding distinct epitopes present on the same antigen. Such binning may be informed by data obtained from affinity analysis using cross blocking experiments and/or affinity analysis instrumentation.

### Affinity Maturation Techniques

[0196] Affinity maturation techniques of the present invention may comprise any of those disclosed in International Patent Application No. WO2014074532, the contents of which are herein incorporated by reference in their entirety. After antibody fragments capable of binding target antigens are identified (e.g. through the use of phage display libraries as described above), high affinity mutants may be derived from these through the process of affinity maturation. Affinity maturation technology is used to identify sequences encoding CDRs that have the highest affinity for target antigens. Using such technologies, select CDR sequences (e.g. ones that have been isolated or produced according to processes described herein) may be mutated randomly as a whole or at specific residues to create millions to billions of variants. Such variants may be subjected to repeated rounds of affinity screening (e.g. display library screening) for their ability to bind target antigens. Such repeated rounds of selection, mutation and expression may be carried out to identify antibody fragment sequences with the highest affinity for target antigens. Such sequences may be directly incorporated into antibody sequences for recombinant antibody production.

### Antibody Characterization

[0197] Compounds and/or compositions of the present invention comprising antibodies may act to decrease local concentration of one or more GPC through removal by phagocytosis, pinocytosis, or inhibiting assembly in the extracellular matrix and/or cellular matrix. Introduction of compounds and/or compositions of the present invention may lead to the removal of 5% to 100% of the growth factor present in a given area. For example, the percent of growth factor removal may be from about 5% to about 10%, from about 5% to about 15%, from about 5% to about 20%, from about 5% to about 25%, from about 10% to about 30%, from about 10% to about 40%, from about 10% to about 50%, from about 10% to about 60%, from about 20% to about 70%, from about 20% to about 80%, from about 40% to about 90% or from about 40% to about 100%.

[0198] Measures of release, inhibition or removal of one or more growth factors may be made relative to a standard or to the natural release or activity of growth factor under normal physiologic conditions, in vitro or in vivo. Measurements may also be made relative to the presence or absence of antibodies. Such methods of measuring growth factor levels, release, inhibition or removal include standard measurement in tissue and/or fluids (e.g. serum or blood) such as Western blot, enzyme-linked immunosorbent assay (ELISA), activity assays, reporter assays, luciferase assays, polymerase chain reaction (PCR) arrays, gene arrays, Real Time reverse transcriptase (RT) PCR and the like.

[0199] Antibodies of the present invention may bind or interact with any number of epitopes on or along GPCs or their associated structures to either enhance or inhibit growth factor signaling. Such epitopes may include any and all possible sites for altering, enhancing or inhibiting GPC function. In some embodiments, such epitopes include, but are not limited to epitopes on or within growth factors, regulatory elements, GPCs, GPC modulatory factors, growth factor receiving cells or receptors, LAPs or LAP-like domains, fastener regions, furin cleavage sites, arm regions, fingers regions, LTBP binding domains, fibrillin binding domains, glycoprotein A repetitions predominant (GARP) binding domains, latency lassos, alpha 1 regions, RGD sequences, bowtie regions, extracellular matrix and/or cellular matrix components and/or epitopes formed by combining regions or portions of any of the foregoing.

[0200] Compounds and/or compositions of the present invention exert their effects via binding (reversibly or irreversibly) to one or more epitopes and/or regions of antibody recognition. While not wishing to be bound by theory, such binding sites for antibodies, are most often formed by proteins, protein domains or regions. Binding sites may; however, include biomolecules such as sugars, lipids, nucleic acid molecules or any other form of binding epitope.

[0201] In some embodiments, antagonist antibodies of the present invention may bind to TGF-β prodomains, stabilizing and preventing integrin-mediated release, for example, by blocking the RGD site or by stabilizing the structure. Such antibodies would be useful in the treatment of Camurati-Engelmann disease, in which mutations in the prodomain cause excessive TGF-β activation. Such antibodies would also be useful in Marfan's syndrome, in which mutations in fibrillins or LTBPs alter TGF-β and BMP activation.

[0202] In some embodiments, antibodies of the present invention selectively inhibit the release of TGF-β from GPCs associated with LTBPs but not those associated with GARP. Such antibodies function as anti-fibrotic therapeutics but exhibit minimal inflammatory effects. In some embodiments, GPC-LTBP complex-binding antibodies do not bind GPC-GARP complexes. In some embodiments, such antibodies, may not be specific to a particular LTBP or GPC, but may bind to GPCs close to or overlapping with GARP binding sites, such that binding is impeded by GARP, but not by LTBPs. In some embodiments, antibodies are provided that selectively bind one or more combinatorial epitopes between GARP and proTGF-β. In some embodiments of the present invention, compounds and/or compositions are provided which induce release of TGF-β from complexes of GARP and proTGF-β. Such antibodies may be selected for their ability to bind to GARP prodomain binary complexes but not ternary complexes of GARP and proTGF-β, GARPs alone, or prodomains alone.

[0203] Alternatively or additionally, antibodies of the present invention may function as ligand mimetics which would induce internalization of GPCs. Such antibodies may act as nontraditional payload carriers, acting to deliver and/or ferry bound or conjugated drug payloads to specific GPC and/or GPC-related sites.

[0204] Changes elicited by antibodies of the present invention may result in neomorphic changes in the cell. As used herein, the term “neomorphic change” refers to a change or alteration that is new or different. For example, an antibody that elicits the release or stabilization of one or more growth factor not typically associated with a particular GPC targeted by the antibody, would be a neomorphic antibody and the release would be a neomorphic change.

[0205] In some embodiments, compounds and/or compositions of the present invention may act to alter and/or control proteolytic events. In some embodiments, such proteolytic events may be intracellular or extracellular. In some embodiments, such proteolytic events may include the alteration of furin cleavage and/or other proteolytic processing events. In some embodiments, such proteolytic events may comprise proteolytic processing of growth factor signaling molecules or downstream cascades initiated by growth factor signaling molecules.

[0206] In some embodiments, compounds and/or compositions of the present invention may induce or inhibit dimerization or multimerization of growth factors (ligands) or their receptors. In some embodiments, such actions may be through stabilization of monomeric, dimeric or multimeric forms or through the disruption of dimeric or multimeric complexes.

[0207] In some embodiments, compounds and/or compositions of the present invention may act on homo and/or heterodimers of the monomeric units comprising either receptor groups or GPCs or other signaling molecule pairs.

[0208] Antibodies of the present invention may be internalized into cells prior to binding target antigens. Upon internalization, such antibodies may act to increase or decrease one or more signaling events, release or stabilize one or more GPCs, block or facilitate growth factor release and/or alter one or more cell niche.

[0209] In some embodiments, compounds and/or compositions of the present invention may also alter the residence time of one or more growth factor in one or more GPC and/or alter the residence time of one or more GPC in the extracellular matrix and/or cellular matrix. Such alterations may result in irreversible localization and/or transient localization.

[0210] Antibodies of the present invention may be designed, manufactured and/or selected using any methods known to one of skill in the art. In some embodiments, antibodies and/or antibody producing cells of the present invention are produced according to any of the methods listed in International Patent Application No. WO2014074532, the contents of which are herein incorporated by reference in their entirety.

### Antibody Generation in Knockout Mice

[0211] In some embodiments, antibodies of the current invention may be generated in knockout mice that lack a gene encoding one or more desired antigens. Such mice would not be tolerized to such antigens and therefore may be able to generate antibodies against them that could cross react with human and mouse forms of the antigen. For the production of monoclonal antibodies, host mice are immunized with the target peptide to elicit lymphocytes that specifically bind that peptide. Lymphocytes are collected and fused with an immortalized cell line. The resulting hybridoma cells are cultured in a suitable culture medium with a selection agent to support the growth of only the fused cells.

[0212] In some embodiments, knocking out one or more growth factor gene may be lethal and/or produce a fetus or neonate that is non-viable. In some embodiments, neonatal animals may only survive for a matter of weeks (e.g. 1, 2, 3, 4 or 5 weeks). In such embodiments, immunizations may be carried out in neonatal animals shortly after birth. Oida et al (Oida, T. et al., TGF-β induces surface LAP expression on Murine CD4 T cells independent of FoxP3 induction. PLOS One. 2010. 5(11):e15523) demonstrate immunization of neonatal TGF-β knockout mice through the use of galectin-1 injections to prolong survival (typically 3-4 weeks after birth in these mice). Mice were immunized with cells expressing murine TGF-β every other day for 10 days beginning on the 8^{th} day after birth and spleen cells were harvested on day 22 after birth. Harvested spleen cells were fused with myeloma cells and of the resulting hybridoma cells, many were found to successfully produce anti-LAP antibodies. In some embodiments of the present invention, these methods may be used to generate antibodies. In some embodiments, such methods may comprise the use of human antigens. In some embodiments, cells used for immunization may express TGF-β and GARP. In such embodiments, GARPs may be expressed with native transmembrane domains to allow for complexes of GARP and TGF-β to remain tethered to the cell surface of the transfected cells used from immunization. Some antigens may comprise proTGF-β1 tethered to LTBP (e.g. LTBP1S). In some cases, recombinant proteins related to other TGF-β family members may be used as antigens.

[0213] Methods of the present invention may also comprise one or more steps of the immunization methods described by Oida et al combined with one or more additional and/or modified steps (e.g. the use of one or more adjuvants). Modified steps may include, but are not limited to the use of alternate cell types for fusions, the pooling of varying number of spleen cells when performing fusions, altering the injection regimen, altering the date of spleen cell harvest, altering immunogen and/or altering immunogen dose. Additional steps may include the harvesting of other tissues (e.g. lymph nodes) from immunized mice.

### Activating and Inhibiting Antibodies

[0214] Antibodies of the present invention may comprise activating or inhibiting antibodies. As used herein, the term “activating antibody” refers to an antibody that promotes growth factor activity. Activating antibodies include antibodies targeting any epitope that promotes growth factor activity. Such epitopes may lie on prodomains (e.g. LAPs and LAP-like domains), growth factors or other epitopes that when bound by antibody, lead to growth factor activity. Activating antibodies of the present invention may include, but are not limited to TGF-β-activating antibodies, GDF-activating antibodies (e.g. GDF-8 or GDF-11-activating antibodies) and BMP-activating antibodies.

[0215] As used herein, the term “inhibiting antibody” refers to an antibody that reduces growth factor activity. Inhibiting antibodies include antibodies targeting any epitope that reduces growth factor activity when associated with such antibodies. Such epitopes may lie on prodomains (e.g. LAPs and LAP-like domains), growth factors or other epitopes that lead to reduced growth factor activity when bound by antibody. Inhibiting antibodies of the present invention may include, but are not limited to TGF-β-inhibiting antibodies, GDF-8-inhibiting antibodies, GDF-11-inhibiting antibodies and BMP-inhibiting antibodies.

[0216] Embodiments of the present invention include methods of using activating and/or inhibiting antibodies in solution, in cell culture and/or in subjects to modify growth factor signaling.

### Anti-LAP and Anti-LAP-Like Domain Antibodies

[0217] In some embodiments, compounds and/or compositions of the present invention may comprise one or more antibody targeting a prodomain, including LAP and/or LAP-like domains. Such antibodies may reduce or elevate growth factor signaling depending on the specific LAP or LAP-like domain that is bound and/or depending on the specific epitope targeted by such antibodies. Anti-LAP and/or anti-LAP-like protein antibodies of the invention may promote dissociation of free growth factors from GPCs. Such dissociation may be induced upon antibody binding to a GPC or dissociation may be promoted by preventing the reassociation of free growth factor with LAP or LAP-like protein. In some cases, anti-TGF-β LAP antibodies are provided. Anti-TGF-β LAP antibodies may comprise TGF-β-activating antibodies. Such antibodies may increase TGF-β activity, in some cases through by releasing TGF-β free growth factor from latent GPCs and/or preventing the reassociation of free TGF-β growth factor with LAP. In some cases, anti-TGF-β LAP antibodies may increase TGF-β activity more favorably when proTGF-β is associated with LTBP. In some cases, anti-TGF-β LAP antibodies may increase TGF-β activity more favorably when proTGF-β is associated with GARP. In some cases, anti-TGF-β LAP antibodies may function synergistically with other TGF-β activators (e.g. αvβ₁, αvβ₆ and/or αᵥβ₈) to increase TGF-β activity.

### Multispecific Antibodies

[0218] In some embodiments, antibodies of the invention may be capable of binding more than one epitope. As used herein, the terms “multibody” or “multispecific antibody” refer to an antibody wherein two or more variable regions bind to different epitopes. The epitopes may be on the same or different targets. In certain embodiments, a multi-specific antibody is a “bispecific antibody,” which recognizes two different epitopes on the same or different antigens.

### Bispecific Antibodies

[0219] In some cases, antibodies of the present invention may be bispecific antibodies. Bispecific antibodies are capable of binding two different antigens. Such antibodies typically comprise antigen-binding regions from at least two different antibodies. For example, a bispecific monoclonal antibody (BsMAb, BsAb) is an artificial protein composed of fragments of two different monoclonal antibodies, thus allowing the BsAb to bind to two different types of antigen.

[0220] Bispecific antibodies may include any of those described in Riethmuller, G., 2012. Cancer Immunity. 12:12-18; Marvin, J. S. et al., 2005. Acta Pharmacologica Sinica. 26(6):649-58; and Schaefer, W. et al., 2011. PNAS. 108(27):11187-92, the contents of each of which are herein incorporated by reference in their entirety.

[0221] New generations of BsMAb, called “trifunctional bispecific” antibodies, have been developed. These consist of two heavy and two light chains, one each from two different antibodies, where the two Fab regions (the arms) are directed against two antigens, and the Fc region (the foot) comprises the two heavy chains and forms the third binding site.

[0222] Of the two paratopes that form the tops of the variable domains of a bispecific antibody, one can be directed against a target antigen and the other against a T-lymphocyte antigen like CD3. In the case of trifunctional antibodies, the Fc region may additionally binds to a cell that expresses Fc receptors, like a mactrophage, a natural killer (NK) cell or a dendritic cell. In sum, the targeted cell is connected to one or two cells of the immune system, which subsequently destroy it.

[0223] Other types of bispecific antibodies have been designed to overcome certain problems, such as short half-life, immunogenicity and side-effects caused by cytokine liberation. They include chemically linked Fabs, consisting only of the Fab regions, and various types of bivalent and trivalent single-chain variable fragments (scFvs), fusion proteins mimicking the variable domains of two antibodies. The furthest developed of these newer formats are the bi-specific T-cell engagers (BiTEs) and mAb2's, antibodies engineered to contain an Fcab antigen-binding fragment instead of the Fc constant region.

[0224] A bispecific, single-chain antibody Fv fragment (Bs-scFv) was successfully used to kill cancer cells. Some human cancers are caused by functional defects in p53 that are restored by gene therapy with wild-type p53. Weisbart, et al., describe the construction and expression of a bispecific single-chain antibody that penetrates living colon cancer cells, binds intracellular p53, and targets and restores its wild type function (Weisbart, et al., Int. J. Oncol. 2004 October; 25(4):1113-8; and Weisbart, et al., Int. J. Oncol. 2004 December; 25(6):1867-73). In these studies, a bispecific, single-chain antibody Fv fragment (Bs-scFv) was constructed from (i) a single-chain Fv fragment of mAb 3E10 that penetrates living cells and localizes in the nucleus, and (ii) a single-chain Fv fragment of a non-penetrating antibody, mAb PAb421 that binds the C-terminal of p53. PAb421 binding restores wild-type functions of some p53 mutants, including those of SW480 human colon cancer cells. The Bs-scFv penetrated SW480 cells and was cytotoxic, suggesting an ability to restore activity to mutant p53. COS-7 cells (monkey kidney cells with wild-type p53) served as a control since they are unresponsive to PAb421 due to the presence of SV40 large T antigen that inhibits binding of PAb421 to p53. Bs-scFv penetrated COS-7 cells but was not cytotoxic, thereby eliminating non-specific toxicity of Bs-scFv unrelated to binding p53. Fv fragments alone were not cytotoxic, indicating that killing was due to transduction of p53. A single mutation in CDR1 of PAb421 VH eliminated binding of the Bs-scFv to p53 and abrogated cytotoxicity for SW480 cells without altering cellular penetration, further supporting the requirement of PAb421 binding to p53 for cytotoxicity (Weisbart, et al., Int. J. Oncol. 2004 October; 25(4):1113-8; and Weisbart, et al., Int. J. Oncol. 2004 December; 25(6):1867-73).

[0225] In some embodiments, antibodies of the present invention may be diabodies. Diabodies are functional bispecific single-chain antibodies (bscAb). These bivalent antigen-binding molecules are composed of non-covalent dimers of scFvs, and can be produced in mammalian cells using recombinant methods. (See, e.g., Mack et al, Proc. Natl. Acad. Sci., 92: 7021-7025, 1995). Few diabodies have entered clinical development. An iodine-123-labeled diabody version of the anti-CEA chimeric antibody cT84.66 has been evaluated for pre-surgical immunoscintigraphic detection of colorectal cancer in a study sponsored by the Beckman Research Institute of the City of Hope (Clinicaltrials.gov NCT00647153) (Nelson, A. L., MAbs. 2010. January-February; 2(1):77-83).

[0226] Using molecular genetics, two scFvs can be engineered in tandem into a single polypeptide, separated by a linker domain, called a “tandem scFv” (tascFv). TascFvs have been found to be poorly soluble and require refolding when produced in bacteria, or they may be manufactured in mammalian cell culture systems, which avoids refolding requirements but may result in poor yields. Construction of a tascFv with genes for two different scFvs yields a “bispecific single-chain variable fragments” (bis-scFvs). Only two tascFvs have been developed clinically by commercial firms; both are bispecific agents in active early phase development by Micromet for oncologic indications, and are described as “Bispecific T-cell Engagers (BiTE).” Blinatumomab is an anti-CD19/anti-CD3 bispecific tascFv that potentiates T-cell responses to B-cell non-Hodgkin lymphoma in Phase 2. MT110 is an anti-EP-CAM/anti-CD3 bispecific tascFv that potentiates T-cell responses to solid tumors in Phase 1. Bispecific, tetravalent “TandAbs” are also being researched by Affimed (Nelson, A. L., MAbs. 2010. January-February; 2(1):77-83).

[0227] Also included are maxibodies (bivalent scFV fused to the amino terminus of the Fc (CH2-CH3 domains) of IgG.

[0228] Bispecific T-cell-engager (BiTE) antibodies are designed to transiently engage cytotoxic T-cells for lysis of selected target cells. The clinical activity of BiTE antibodies corroborates findings that ex vivo expanded, autologous T-cells derived from tumor tissue, or transfected with specific T-cell receptors, have shown therapeutic potential in the treatment of solid tumors. While these personalized approaches prove that T-cells alone can have considerable therapeutic activity, even in late-stage cancer, they are cumbersome to perform on a broad basis. This is different for cytotoxic T-lymphocyte antigen 4 (CTLA-4) antibodies, which facilitate generation of tumor-specific T-cell clones, and also for bi- and tri-specific antibodies that directly engage a large proportion of patients' T-cells for cancer cell lysis. The potential of global T-cell engagement for human cancer therapy by T-cell-engaging antibodies is under active investigation (Baeuerle P A, et al., Current Opinion in Molecular Therapeutics. 2009, 11(1):22-30).

[0229] Third generation molecules include “miniaturized” antibodies. Among the best examples of mAb miniaturization are the small modular immunopharmaceuticals (SMIPs) from Trubion Pharmaceuticals. These molecules, which can be monovalent or bivalent, are recombinant single-chain molecules containing one V_{L}, one V_{H} antigen-binding domain, and one or two constant “effector” domains, all connected by linker domains. Presumably, such a molecule might offer the advantages of increased tissue or tumor penetration claimed by fragments while retaining the immune effector functions conferred by constant domains. At least three “miniaturized” SMIPs have entered clinical development. TRU-015, an anti-CD20 SMIP developed in collaboration with Wyeth, is the most advanced project, having progressed to Phase 2 for rheumatoid arthritis (RA). Earlier attempts in systemic lupus erythrematosus (SLE) and B cell lymphomas were ultimately discontinued. Trubion and Facet Biotechnology are collaborating in the development of TRU-016, an anti-CD37 SMIP, for the treatment of CLL and other lymphoid neoplasias, a project that has reached Phase 2. Wyeth has licensed the anti-CD20 SMIP SBI-087 for the treatment of autoimmune diseases, including RA, SLE and possibly multiple sclerosis, although these projects remain in the earliest stages of clinical testing. (Nelson, A. L., MAbs. 2010. January-February; 2(1):77-83).

[0230] Genmab is researching application of their “Unibody” technology, in which the hinge region has been removed from IgG4 molecules. While IgG4 molecules are unstable and can exchange light-heavy chain heterodimers with one another, deletion of the hinge region prevents heavy chain-heavy chain pairing entirely, leaving highly specific monovalent light/heavy heterodimers, while retaining the Fc region to ensure stability and half-life in vivo. This configuration may minimize the risk of immune activation or oncogenic growth, as IgG4 interacts poorly with FcRs and monovalent unibodies fail to promoteintracellular signaling complex formation. These contentions are, however, largely supported by laboratory, rather than clinical, evidence. Biotecnol is also developing a “miniaturized” mAb, CAB051, which is a “compacted” 100 kDa anti-HER2 antibody in preclinical research (Nelson, A. L., MAbs. 2010. January-February; 2(1):77-83).

[0231] Recombinant therapeutics composed of single antigen-binding domains have also been developed, although they currently account for only 4% of the clinical pipeline. These molecules are extremely small, with molecular weights approximately one-tenth of those observed for full-sized mAbs. Arana and Domantis engineer molecules composed of antigen-binding domains of human immunoglobulin light or heavy chains, although only Arana has a candidate in clinical testing, ART-621, an anti-TNFα molecule in Phase 2 study for the treatment of psoriasis and rheumatoid arthritis. Ablynx produces “nanobodies” derived from the antigen-binding variable heavy chain regions (V_{HH}s) of heavy chain antibodies found in camels and llamas, which lack light chains. Two Ablynx anti-von Willebrand Factor nanobodies have advanced to clinical development, including ALX-0081, in Phase 2 development as an intravenous therapy to prevent thrombosis in patients undergoing percutaneous coronary intervention for acute coronary syndrome, and ALX-0681, a Phase 1 molecule for subcutaneous administration intended for both patients with acute coronary syndrome and thrombotic thrombocytopenic purpura (Nelson, A. L., MAbs. 2010. January-February; 2(1):77-83).

### Development of Multispecific Antibodies

[0232] In some embodiments, antibody sequences of the invention may be used to develop multispecific antibodies (e.g., bispecific, tri specific, or of greater multi specificity). Multi specific antibodies can be specific for different epitopes of a target antigen of the present invention, or can be specific for both a target antigen of the present invention, and a heterologous epitope, such as a heterologous glycan, peptide or solid support material. (See, e.g., WO 93/17715; WO 92/08802; WO 91/00360; WO 92/05793; Tutt, A. et al., Trispecific F(ab′)3 derivatives that use cooperative signaling via the TCR/CD3 complex and CD2 to activate and redirect resting cytotoxic T cells. J. Immunol. 1991 Jul. 1; 147(1):60-9; U.S. Pat. Nos. 4,474,893; 4,714,681; 4,925,648; 5,573,920; 5,601,819; and Kostelny, S. A. et al., Formation of a bispecific antibody by the use of leucine zippers. J. Immunol. 1992 Mar. 1; 148(5):1547-53); U.S. Pat. No. 5,932,448.

[0233] Disclosed and claimed in PCT Publication WO2014144573 to Memorial Sloan-Kettering Cancer Center are multimerization technologies for making dimeric multispecific binding agents (e.g., fusion proteins comprising antibody components) with improved properties over multispecific binding agents without the capability of dimerization.

[0234] Disclosed and claimed in PCT Publication WO2014144357 to Merck Patent GMBH are tetravalent bispecific antibodies (TetBiAbs), and methods of making and methods of using TetBiAbs for diagnostics and for the treatment of cancer or immune disorders. TetBiAbs feature a second pair of Fab fragments with a second antigen specificity attached to the C-terminus of an antibody, thus providing a molecule that is bivalent for each of the two antigen specificities. The tetravalent antibody is produced by genetic engineering methods, by linking an antibody heavy chain covalently to a Fab light chain, which associates with its cognate, co-expressed Fab heavy chain.

[0235] Disclosed and claimed in PCT Publication WO2014028560 to IBC Pharmaceuticals, Inc. are T cell redirecting bispecific antibodies (bsAb), with at least one binding site for a T-cell antigen and at least one binding site for an antigen on a diseased cell or pathogen, for treatment of disease. Preferably, this bsAb is an anti-CD3× anti-CD19 bispecific antibody, although antibodies against other T-cell antigens and/or disease-associated antigens may be used. The complex is capable of targeting effector T cells to induce T-cell-mediated cytotoxicity of cells associated with a disease, such as cancer, autoimmune disease or infectious disease. The cytotoxic immune response is enhanced by co-administration of interfon-based agents that comprise interferon-α, interferon-bgr; interferon-λ1, interferon-λ2 or interferon-λ3.

[0236] Disclosed and claimed in PCT Publication WO2013092001 to Synimmune GMBH is a bispecific antibody molecule, as well as a method for producing the same, its use and a nucleic acid molecule encoding the bispecific antibody molecule. In particular is provided an antibody molecule that is capable of mediating target cell restricted activation of immune cells.

[0237] Disclosed and claimed in PCT Publication WO2012007167 is a multispecific modular antibody specifically binding to at least a glycoepitope and a receptor of the erbB class on the surface of a tumor cell, thereby crosslinking the glycoepitope and the receptor, which antibody has apoptotic activity effecting cytolysis independent of NK cells.

[0238] Disclosed and claimed in PCT Publications WO2012048332 and WO2013055404 are meditopes, meditope-binding antibodies, meditope delivery systems, as well as a monoclonal antibody framework binding interface for meditopes, and methods for their use. Specifically, two antibody binding peptides, C-QFDLSTRRLK-C(SEQ ID NO: 383) (“cQFD”; SEQ ID NO:1 therein) and C-QYNLSSRALK-C(SEQ ID NO: 384) (“cQYN”; SEQ ID NO:2 therein) were shown to have novel mAb binding properties. Also called “meditopes,” cQFD and cQYN were shown to bind to a region of the Fab framework of the anti-EGFR mAb cetuximab and not to bind the complementarity determining regions (CDRs) that bind antigen. The binding region on the Fab framework is distinct from other framework-binding antigens, such as the superantigens Staphylococcal protein A (SpA) (Graille et al., 2000) and Peptostreptococcus magnus protein L (PpL) (Graille et al., 2001). Accordingly, one embodiment disclosed is a framework binding interface comprising a framework region of a unique murine-human antibody or functional fragment thereof that binds a cyclic meditope.

[0239] Exemplary patents and patent publications of interest are: U.S. Pat. Nos. 5,585,089; 5,693,761; and 5,693,762, all filed Jun. 7, 1995 and U.S. Pat. No. 6,180,370, all assigned to Protein Design Labs, Inc., describe methods for producing, and compositions of, humanized immunoglobulins having one or more complementarity determining regions (CDR's) and possible additional amino acids from a donor immunoglobulin and a framework region from an accepting human immunoglobulin. Each humanized immunoglobulin chain is said to usually comprise, in addition to the CDR's, amino acids from the donor immunoglobulin framework that are, e.g., capable of interacting with the CDRs to effect binding affinity, such as one or more amino acids which are immediately adjacent to a CDR in the donor immunoglobulin or those within about about 3 Å as predicted by molecular modeling. The heavy and light chains may each be designed by using any one or all of various position criteria. When combined into an intact antibody, the humanized immunoglobulins of the present invention is said to be substantially non-immunogenic in humans and retain substantially the same affinity as the donor immunoglobulin to the antigen, such as a protein or other compound containing an epitope.

[0240] U.S. Pat. No. 5,951,983, assigned to Universite Catholique De Louvain and Bio Transplant, Inc., describes a humanized antibody against T-lymphocytes. Framework regions from a human V kappa gene designated as HUM5400 (EMBL accession X55400) and from the human antibody clone Amu 5-3 (GenBank accession number U00562) are set forth therein.

[0241] U.S. Pat. No. 5,091,513, to Creative Biomolecules, Inc., describes a family of synthetic proteins having affinity for a preselected antigen. The proteins are characterized by one or more sequences of amino acids constituting a region which behaves as a biosynthetic antibody binding site (BABS). The sites comprise 1) non-covalently associated or disulfide bonded synthetic V_{H} and V_{L} dimers, 2) V_{H}-V_{L} or V_{L}-V_{H} single chains wherein the V_{H} and V_{L} are attached by a polypeptide linker, or 3) individuals V_{H} or V_{L} domains. The binding domains comprise linked CDR and FR regions, which may be derived from separate immunoglobulins. The proteins may also include other polypeptide sequences which function, e.g., as an enzyme, toxin, binding site, or site of attachment to an immobilization media or radioactive atom. Methods are disclosed for producing the proteins, for designing BABS having any specificity that can be elicited by in vivo generation of antibody, and for producing analogs thereof

[0242] U.S. Pat. No. 8,399,625, to ESBATech, an Alcon Biomedical Research Unit, LLC, describes antibody acceptor frameworks and methods for grafting non-human antibodies, e.g., rabbit antibodies, using a particularly well suited antibody acceptor framework.

### Intrabodies

[0243] In some embodiments, antibodies of the present invention may be intrabodies. Intrabodies are a form of antibody that is not secreted from a cell in which it is produced, but instead targets one or more intracellular proteins. Intrabodies are expressed and function intracellularly, and may be used to affect a multitude of cellular processes including, but not limited to intracellular trafficking, transcription, translation, metabolic processes, proliferative signaling and cell division. In some embodiments, methods described herein include intrabody-based therapies. In some such embodiments, variable domain sequences and/or CDR sequences disclosed herein are incorporated into one or more constructs for intrabody-based therapy. For example, intrabodies may target one or more glycated intracellular proteins or may modulate the interaction between one or more glycated intracellular proteins and an alternative protein.

[0244] More than two decades ago, intracellular antibodies against intracellular targets were first described (Biocca, Neuberger and Cattaneo EMBO J. 9: 101-108, 1990). The intracellular expression of intrabodies in different compartments of mammalian cells allows blocking or modulation of the function of endogenous molecules (Biocca, et al., EMBO J. 9: 101-108, 1990; Colby et al., Proc. Natl. Acad. Sci. U.S.A. 101: 17616-21, 2004). Intrabodies can alter protein folding, protein-protein, protein-DNA, protein-RNA interactions and protein modification. They can induce a phenotypic knockout and work as neutralizing agents by direct binding to the target antigen, by diverting its intracellular traffic or by inhibiting its association with binding partners. They have been largely employed as research tools and are emerging as therapeutic molecules for the treatment of human diseases as viral pathologies, cancer and misfolding diseases. The fast growing bio-market of recombinant antibodies provides intrabodies with enhanced binding specificity, stability and solubility, together with lower immunogenicity, for their use in therapy (Biocca, abstract in Antibody Expression and Production Cell Engineering Volume 7, 2011, pp. 179-195).

[0245] In some embodiments, intrabodies have advantages over interfering RNA (iRNA); for example, iRNA has been shown to exert multiple non-specific effects, whereas intrabodies have been shown to have high specificity and affinity of to target antigens. Furthermore, as proteins, intrabodies possess a much longer active half-life than iRNA. Thus, when the active half-life of the intracellular target molecule is long, gene silencing through iRNA may be slow to yield an effect, whereas the effects of intrabody expression can be almost instantaneous. Lastly, it is possible to design intrabodies to block certain binding interactions of a particular target molecule, while sparing others.

### Development of Intrabodies

[0246] Intrabodies are often single chain variable fragments (scFvs) expressed from a recombinant nucleic acid molecule and engineered to be retained intracellularly (e.g., retained in the cytoplasm, endoplasmic reticulum, or periplasm). Intrabodies may be used, for example, to ablate the function of a protein to which the intrabody binds. The expression of intrabodies may also be regulated through the use of inducible promoters in the nucleic acid expression vector comprising the intrabody. Intrabodies may be produced using methods known in the art, such as those disclosed and reviewed in: (Marasco et al., 1993 Proc. Natl. Acad. Sci. USA, 90: 7889-7893; Chen et al., 1994, Hum. Gene Ther. 5:595-601; Chen et al., 1994, Proc. Natl. Acad. Sci. USA, 91: 5932-5936; Maciejewski et al., 1995, Nature Med., 1: 667-673; Marasco, 1995, Immunotech, 1: 1-19; Mhashilkar, et al., 1995, EMBO J. 14: 1542-51; Chen et al., 1996, Hum. Gene Therap., 7: 1515-1525; Marasco, Gene Ther. 4:11-15, 1997; Rondon and Marasco, 1997, Annu. Rev. Microbiol. 51:257-283; Cohen, et al., 1998, Oncogene 17:2445-56; Proba et al., 1998, J. Mol. Biol. 275:245-253; Cohen et al., 1998, Oncogene 17:2445-2456; Hassanzadeh, et al., 1998, FEBS Lett. 437:81-6; Richardson et al., 1998, Gene Ther. 5:635-44; Ohage and Steipe, 1999, J. Mol. Biol. 291:1119-1128; Ohage et al., 1999, J. Mol. Biol. 291:1129-1134; Wirtz and Steipe, 1999, Protein Sci. 8:2245-2250; Zhu et al., 1999, J. Immunol. Methods 231:207-222; Arafat et al., 2000, Cancer Gene Ther. 7:1250-6; der Maur et al., 2002, 1 Biol. Chem. 277:45075-85; Mhashilkar et al., 2002, Gene Ther. 9:307-19; and Wheeler et al., 2003, FASEB J. 17: 1733-5; and references cited therein). In particular, a CCR5 intrabody has been produced by Steinberger et al., 2000, Proc. Natl. Acad. Sci. USA 97:805-810). See generally Marasco, W A, 1998, “Intrabodies: Basic Research and Clinical Gene Therapy Applications” Springer: New York; and for a review of scFvs, see Pluckthun in “The Pharmacology of Monoclonal Antibodies,” 1994, vol. 113, Rosenburg and Moore eds. Springer-Verlag, New York, pp. 269-315.

[0247] In some embodiments, antibody sequences disclosed herein may be used to develop intrabodies. Intrabodies are often recombinantly expressed as single domain fragments such as isolated VH and VL domains or as a single chain variable fragment (scFv) antibody within the cell. For example, intrabodies are often expressed as a single polypeptide to form a single chain antibody comprising the variable domains of the heavy and light chain joined by a flexible linker polypeptide. Intrabodies typically lack disulfide bonds and are capable of modulating the expression or activity of target genes through their specific binding activity. Single chain antibodies can also be expressed as a single chain variable region fragment joined to the light chain constant region.

[0248] As is known in the art, an intrabody can be engineered into recombinant polynucleotide vectors to encode sub-cellular trafficking signals at its N or C terminus to allow expression at high concentrations in the sub-cellular compartments where a target protein is located. For example, intrabodies targeted to the endoplasmic reticulum (ER) are engineered to incorporate a leader peptide and, optionally, a C-terminal ER retention signal, such as the KDEL amino acid motif (SEQ ID NO: 387). Intrabodies intended to exert activity in the nucleus are engineered to include a nuclear localization signal. Lipid moieties are joined to intrabodies in order to tether the intrabody to the cytosolic side of the plasma membrane. Intrabodies can also be targeted to exert function in the cytosol. For example, cytosolic intrabodies are used to sequester factors within the cytosol, thereby preventing them from being transported to their natural cellular destination.

[0249] There are certain technical challenges with intrabody expression. In particular, protein conformational folding and structural stability of the newly-synthesized intrabody within the cell is affected by reducing conditions of the intracellular environment. In human clinical therapy, there are safety concerns surrounding the application of transfected recombinant DNA, which is used to achieve intrabody expression within the cell. Of particular concern are the various viral-based vectors commonly-used in genetic manipulation. Thus, one approach to circumvent these problems is to fuse protein transduction domains (PTD) to scFv antibodies, to create a ‘cell-permeable’ antibody or ‘Transbody.’ Transbodies are cell-permeable antibodies in which a protein transduction domain (PTD) is fused with single chain variable fragment (scFv) antibodies (Heng and Cao, 2005, Med Hypotheses. 64:1105-8).

[0250] Upon interaction with a target gene, an intrabody modulates target protein function and/or achieves phenotypic/functional knockout by mechanisms such as accelerating target protein degradation and sequestering the target protein in a non-physiological sub-cellular compartment. Other mechanisms of intrabody-mediated gene inactivation can depend on the epitope to which the intrabody is directed, such as binding to the catalytic site on a target protein or to epitopes that are involved in protein-protein, protein-DNA, or protein-RNA interactions.

[0251] In one embodiment, intrabodies are used to capture a target in the nucleus, thereby preventing its activity within the nucleus. Nuclear targeting signals are engineered into such intrabodies in order to achieve the desired targeting. Such intrabodies are designed to bind specifically to a particular target domain. In another embodiment, cytosolic intrabodies that specifically bind to a target protein are used to prevent the target from gaining access to the nucleus, thereby preventing it from exerting any biological activity within the nucleus (e.g., preventing the target from forming transcription complexes with other factors).

[0252] In order to specifically direct the expression of such intrabodies to particular cells, the transcription of the intrabody is placed under the regulatory control of an appropriate tumor-specific promoter and/or enhancer. In order to target intrabody expression specifically to prostate, for example, the PSA promoter and/or promoter/enhancer can be utilized (See, for example, U.S. Pat. No. 5,919,652 issued 6 Jul. 1999).

[0253] Protein transduction domains (PTDs) are short peptide sequences that enable proteins to translocate across the cell membrane and be internalized within the cytosol, through atypical secretory and internalization pathways. There are a number of distinct advantages that a Transbody′ would possess over conventional intrabodies expressed within the cell. For a start, ‘correct’ conformational folding and disulfide bond formation can take place prior to introduction into the target cell. More importantly, the use of cell-permeable antibodies or Transbodies' would avoid the overwhelming safety and ethical concerns surrounding the direct application of recombinant DNA technology in human clinical therapy, which is required for intrabody expression within the cell. Transbodies' introduced into the cell would possess only a limited active half-life, without resulting in any permanent genetic alteration. This would allay any safety concerns with regards to their application in human clinical therapy (Heng and Cao 2005, Med Hypotheses. 64:1105-8).

[0254] Intrabodies are promising therapeutic agents for the treatment of misfolding diseases, including Alzheimer's, Parkinson's, Huntington's and prion diseases, because of their virtually infinite ability to specifically recognize the different conformations of a protein, including pathological isoforms, and because they can be targeted to the potential sites of aggregation (both intra- and extracellular sites). These molecules can work as neutralizing agents against amyloidogenic proteins by preventing their aggregation, and/or as molecular shunters of intracellular traffic by rerouting the protein from its potential aggregation site (Cardinale, and Biocca, Curr. Mol. Med. 2008, 8:2-11).

[0255] Exemplary Patent Publications describing intracellular antibodies or intrabodies are set forth hereinbelow, each of which is incorporated by reference in its entirety.

[0256] PCT Publication WO03014960 and U.S. Pat. No. 7,608,453 granted to Cattaneo, et al., describe an intracellular antibody capture technology method of identifying at least one consensus sequence for an intracellular antibody (ICS) comprising the steps of: creating a database comprising sequences of validated intracellular antibodies (VIDA database) and aligning the sequences of validated intracellular antibodies according to Kabat; determining the frequency with which a particular amino acid occurs in each of the positions of the aligned antibodies; selecting a frequency threshold value (LP or consensus threshold) in the range from 70% to 100%; identifying the positions of the alignment at which the frequency of a particular amino acid is greater than or equal to the LP value; and identifying the most frequent amino acid, in the position of said alignment.

[0257] PCT Publications WO0054057; WO03077945; WO2004046185; WO2004046186; WO2004046187; WO2004046188; WO2004046189; US Patent Application Publications US2005272107; US2005276800; US2005288492; 052010143939; granted U.S. Pat. Nos. 7,569,390 and 7,897,347 and granted European Patents EP1560853; and EP1166121 all assigned to the Medical Research Council and including inventors Cattaneo, et al., describe intracellular intracellular single domain immunoglobulins, and a method for determining the ability of a immunoglobulin single domain to bind to a target in an intracellular environment, as well as methods for generating intracellular antibodies.

[0258] PCT Publication WO0235237; US Patent Application Publication 2003235850 and granted European Patent EP1328814 naming Catteneo as an inventor and assigned to S.I.S.S.A. Scuola Internazionale Superiore describe a method for the in vivo identification of epitopes of an intracellular antigen.

[0259] PCT Publication WO2004046192 and European Patent EP1565558 assigned to Lay Line Genomics SPA and naming Catteneo as an inventor describe a method for isolating intracellular antibodies that disrupt and neutralize an interaction between a protein ligand x and a protein ligand y inside a cell. Also disclosed are a method to identify a protein ligand x able to bind to a known y ligand using intracellular antibodies able to the interaction between x and y; and a method for the isolation of a set of antibody fragments against a significant proportion of the protein-protein interactions of a given cell (interactome) or against the protein interactions that constitute an intracellular pathway or network.

[0260] US Patent Application Publication 2006034834 and PCT Publication WO9914353 entitled “Intrabody-mediated control of immune reactions” and assigned to Dana Farber Cancer Institute Inc. name inventors Marasco and Mhashilkar are directed to methods of altering the regulation of the immune system, e.g., by selectively targeting individual or classes of immunomodulatory receptor molecules (IRMs) on cells comprising transducing the cells with an intracellularly expressed antibody, or intrabody, against the IRMs. In a preferred embodiment the intrabody comprises a single chain antibody against an IRM, e.g, MHC-1 molecules.

[0261] PCT Publication WO2013033420 assigned to Dana Farber Cancer Institute Inc. and Whitehead Biomedical Institute, and naming inventors Bradner, Rahl and Young describes methods and compositions useful for inhibiting interaction between a bromodomain protein and an immunoglobulin (Ig) regulatory element and downregulating expression of an oncogene translocated with an Ig locus, as well as for treating a cancer (e.g., hematological malignancy) characterized by increased expression of an oncogene which is translocated with an Ig locus. Intrabodies are generally described.

[0262] PCT Publication WO02086096 and US Patent Application Publication 2003104402 entitled “Methods of producing or identifying intrabodies in eukaryotic cells,” assigned to University of Rochester Medical Center and naming inventors Zauderer, Wei and Smith describe a high efficiency method of expressing intracellular immunoglobulin molecules and intracellular immunoglobulin libraries in eukaryotic cells using a trimolecular recombination method. Further provided are methods of selecting and screening for intracellular immunoglobulin molecules and fragments thereof, and kits for producing, screening and selecting intracellular immunoglobulin molecules, as well as the intracellular immunoglobulin molecules and fragments produced using these methods.

[0263] PCT Publication WO2013023251 assigned to Affinity Biosciences PTY LTD and naming inventors Beasley, Niven and Kiefel describes polypeptides, such as antibody molecules and polynucleotides encoding such polypeptides, and libraries thereof, wherein the expressed polypeptides that demonstrate high stability and solubility. In particular, polypeptides comprising paired VL and VH domains that demonstrate soluble expression and folding in a reducing or intracellular environment are described, wherein a human scFv library was screened, resulting in the isolation of soluble scFv genes that have identical framework regions to the human germline sequence as well as remarkable thermostability and tolerance of CDR3 grafting onto the scFv scaffold.

[0264] European Patent Application EP2314622 and PCT Publications WO03008451 and WO03097697 assigned to Esbatech AG and University of Zuerich and naming inventors Ewert, Huber, Honneger and Plueckthun describe the modification of human variable domains and provide compositions useful as frameworks for the creation of very stable and soluble single-chain FIT antibody fragments. These frameworks have been selected for intracellular performance and are thus ideally suited for the creation of scFv antibody fragments or scFv antibody libraries for applications where stability and solubility are limiting factors for the performance of antibody fragments, such as in the reducing environment of a cell. Such frameworks can also be used to identify highly conserved residues and consensus sequences which demonstrate enhanced solubility and stability.

[0265] PCT Publication WO02067849 and US Patent Application Publication 2004047891 entitled “Systems devices and methods for intrabody targeted delivery and reloading of therapeutic agents” describe systems, devices and methods for intrabody targeted delivery of molecules. More particularly, some embodiments relate to a reloadable drug delivery system, which enables targeted delivery of therapeutic agents to a tissue region of a subject, in a localized and timely manner.

[0266] PCT Publication WO2005063817 and U.S. Pat. No. 7,884,054 assigned to Amgen Inc. and naming inventors Zhou, Shen and Martin describe methods for identifying functional antibodies, including intrabodies. In particular, a homodimeric intrabody is described, wherein each polypeptide chain of the homodimer comprises an Fc region, an scFv, and an intracellular localization sequence. The intracellular localization sequence may cause the intrabody to be localized to the ER or the Golgi. Optionally, each polypeptide chain comprises not more than one scFv.

[0267] PCT Publication WO2013138795 by Vogan, et al. and assigned to Permeon Biologics Inc. describes cell penetrating compositions for delivery of intracellular antibodies and antibody-like moieties and methods for delivering them (referred to herein as “AAM moieties” or “an AAM moiety”) into a cell. Without being bound by theory, the present disclosure is based, at least in part, on the discovery that an AAM moiety can be delivered into a cell by complexing the AAM moiety with a cell penetrating polypeptide having surface positive charge (referred to herein as a “Surf+ Penetrating Polypeptide”). Examples of some applications of intraphilin technology are also provided

[0268] PCT Publication WO2010004432 assigned to the Pasteur Institute describes immunoglobulins from camelidae (camels, dromedaries, llamas and alpacas), about 50% of which are antibodies devoid of light chain. These heavy-chain antibodies interact with the antigen by the virtue of only one single variable domain, referred to as VHH(s), VHH domain(s) or VHH antibody (ies). Despite the absence of light chain, these homodimeric antibodies exhibit a broad antigen-binding repertoire by enlarging their hypervariable regions, and can act as a transbody and/or intrabody in vitro as well as in vivo, when the VHH domain is directed against an intracellular target.

[0269] PCT Publication WO2014106639 describes a method for identifying a cellular target involved in a cell phenotype by identifying an intrabody that can modify a cell phenotype and identifying a direct or indirect cellular target of the intrabody. In particular, intrabodies 3H2-1, 3H2-VH and 5H4 are capable of inhibiting the degranulation reaction in mast cells triggered by an allergic stimulus; furthermore, intrabodies 3H2-1 and 5H4 directly or indirectly targeted a protein of the ABCF1 family and C120RF4 family, respectively. These ABCF1 and C120RF4 inhibitors are said to be useful in therapy, in particular for treating allergic and/or inflammatory conditions.

[0270] PCT Publication WO0140276 assigned to Urogenesis Inc. generally describes the possibility of inhibition of STEAP (Six Transmembrane Epithelial Antigen of the Prostate) proteins using intracellular antibodies (intrabodies).

[0271] PCT Publication WO02086505 assigned to University of Manchester and US Patent Application Publication US2004115740 naming inventors Simon and Benton describe a method for the intracellular analysis of a target molecule, wherein intrabodies are said to be preferred. In one embodiment, a vector (designated pScFv-ECFP) capable of expressing an anti-MUC1 intrabody coupled to CFP is described.

[0272] PCT Publication WO03095641 and WO0143778 assigned to Gene Therapy Systems Inc. describe compositions and methods for intracellular protein delivery, and intrabodies are generally described.

[0273] PCT Publication WO03086276 assigned to Selective Genetics Inc. describes a platform technology for the treatment of intracellular infections. Compositions and methods described therein include non-target specific vectors that target infectable cells via linked ligands that bind and internalize through cell surface receptors/moieties associated with infection. The vectors comprise exogenous nucleic acid sequences that are expressed upon internalization into a target cell. Vector associated ligands and nucleic acid molecules may be altered to target different infectious agents. In addition, the invention provides methods of identifying epitopes and ligands capable of directing internalization of a vector and capable of blocking viral entry.

[0274] PCT Publication WO03062415 assigned to Erasmus University describes a transgenic organism comprising a polynucleotide construct encoding an intracellular antibody which disrupts the catalysis of the production of the xenoantigen galactose alpha 1,3 galactose and/or a polynucleotide construct which encodes an intracellular antibody which binds specifically to a retrovirus protein, such as a PERV particle protein. Cells, tissues and organs of the transgenic organism may be used in xenotransplantation.

[0275] PCT Publication WO2004099775 entitled “Means for detecting protein conformation and applications thereof” describes the use of scFv fragments as conformation-specific antibodies for specifically detecting a conformational protein state, said to have applications as sensors for following in livings cells, upon intracellular expression, the behavior of endogeneous proteins.

[0276] PCT Publication WO2008070363 assigned to Imclone Systems Inc. describes a single domain intrabody that binds to an intracellular protein or to an intracellular domain of an intracellular protein, such as Etk, the endothelial and epithelial tyrosine kinase, which is a member of the Tec family of non-receptor tyrosine kinases. Also provided is a method of inhibiting an intracellular enzyme, and treating a tumor in a patient by administering the intrabody or a nucleic acid expressing the intrabody.

[0277] PCT Publication WO2009018438 assigned to Cornell Research Foundation Inc. describes a method of identifying a protein that binds to a target molecule and has intracellular functionality, by providing a construct comprising a DNA molecule encoding the protein which binds to the target molecule, with the DNA molecule being coupled to a stall sequence. A host cell is transformed with the construct and then cultured under conditions effective to form, within the host cell, a complex of the protein whose translation has been stalled, the mRNA encoding the protein, and ribosomes. The protein in the complex is in a properly folded, active form and the complex is recovered from the cell. This method can be carried out with a cell-free extract preparation containing ribosomes instead of a host cell. The present invention also relates to a construct which includes a DNA molecule encoding a protein that binds to a target molecule and an SecM stalling sequence coupled to the DNA molecule. The DNA molecule and the SecM stalling sequence are coupled with sufficient distance between them to permit expression of their encoded protein, within the cell, in a properly folded, active form. The use of intrabodies is generally described.

[0278] PCT Publication WO2014030780 assigned to Mogam Biotech Research Institute describes a method named Tat-associated protein engineering (TAPE), for screening a target protein having higher solubility and excellent thermostability, in particular, an immunoglobulin variable domain (VH or VL) derived from human germ cells, by preparing a gene construct where the target protein and an antibiotic-resistant protein are linked to a Tat signal sequence, and then expressing this within E. coli. Also disclosed are human or engineered VH and VL domain antibodies and human or engineered VH and VL domain antibody scaffolds having solubility and excellent thermostability, which are screened by the TAPE method. Also provided is a library including random CDR sequences in the human or engineered VH or VL domain antibody scaffold screened by the TAPE method, a preparing method thereof, a VH or VL domain antibody having binding ability to the target protein screened by using the library, and a pharmaceutical composition including the domain antibody.

[0279] European Patent Application EP2422811 describes an antibody that binds to an intracellular epitope; such intrabodies comprise at least a portion of an antibody that is capable of specifically binding an antigen and preferably does not contain operable sequences coding for its secretion and thus remains within the cell. In one embodiment, the intrabody comprises a scFv. The scFv polypeptide further comprises a polypeptide linker between the VH and VL domains which enables the scFv to form the desired structure for antigen binding. Also described is a specific embodiment in which the intrabody binds to the cytoplasmic domain of an Eph receptor and prevents its signaling (e.g., autophosphorylation). In another specific embodiment, an intrabody binds to the cytoplasmic domain of a B-type Ephrin (e.g., EphrinB1, EphrinB2 or EphrinB3).

[0280] PCT Publication WO2011003896 and European Patent Application EP2275442 describe intracellular functional PCNA-Chromobodies made using nucleic acid molecule encoding a polypeptide specifically binding to proliferating cell nuclear antigen (PCNA). Examples of such polypeptides comprising conservative substitutions of one or more amino acids in one or two framework regions are represented by SEQ ID NOs 16 and 18, including the framework region of the polypeptide. In the examples, the framework regions as well as the CDR regions involved in the binding of PCNA have been determined.

[0281] European Patent Application EP2703485 describes a method for selecting plasma cells or plasmablasts, as well as for producing target antigen specific antibodies, and novel monoclonal antibodies. In one embodiment, cells expressing intracellular immunoglobulin were identified.

### Structural Analysis

[0282] In some cases, recombinant proteins of the invention may be subjected to structural analysis using any methods available in the art to reveal one or more structural features (e.g. secondary, tertiary and/or quaternary structure). Methods of structural analysis may include, but are not limited to X-ray crystallography, nuclear magnetic resonance analysis, hydrogen/deuterium exchange mass spectrometry, and computer-based modeling. In some cases, structural analysis may be used to identify epitopes that may be desireable targets for inhibiting or activating antibodies. For instance, in some cases, structural analysis of a protein complex may reveal one or more epitopes where antibody binding may stabilize the complex. In some cases, structural analysis of a protein complex may reveal one or more epitopes where antibody binding may destabilize the complex. In some cases, structural analysis may be used to identify one or more epitopes where antibody binding may prevent complex formation.

[0283] In some embodiments, structural analysis may be used to assess interactions between antibodies of the invention and their targets. Such analysis may be used to provide insight into the exact epitope bound by a particular antibody and/or or provide insight into how a particular antibody performs a specific function (e.g. inhibitory or activating functions).

[0284] In some cases, structural analysis may be used to help in the design of one or more recombinant proteins, for example, recombinant proteins to be used as antigens or to be used in selection of binding partners from a display library.

### Variations

[0285] Compounds and/or compositions of the present invention may exist as a whole polypeptide, a plurality of polypeptides or fragments of polypeptides, which independently may be encoded by one or more nucleic acids, a plurality of nucleic acids, fragments of nucleic acids or variants of any of the aforementioned. As used herein, the term “polypeptide” refers to a polymer of amino acid residues (natural or unnatural) linked together most often by peptide bonds. The term, as used herein, refers to proteins, polypeptides, and peptides of any size, structure, or function. In some instances the polypeptide encoded is smaller than about 50 amino acids and the polypeptide is then termed a peptide. If the polypeptide is a peptide, it will be at least about 2, 3, 4, or at least 5 amino acid residues long. Thus, polypeptides include gene products, naturally occurring polypeptides, synthetic polypeptides, homologs, orthologs, paralogs, fragments and other equivalents, variants, and analogs of the foregoing. A polypeptide may be a single molecule or may be a multi-molecular complex such as a dimer, trimer or tetramer. They may also comprise single chain or multichain polypeptides and may be associated or linked. The term polypeptide may also apply to amino acid polymers in which one or more amino acid residues are an artificial chemical analogue of a corresponding naturally occurring amino acid.

[0286] As used herein, the term “polypeptide variant” refers to molecules which differ in their amino acid sequence from a native or reference sequence. The amino acid sequence variants may possess substitutions, deletions, and/or insertions at certain positions within the amino acid sequence, as compared to a native or reference sequence. Variants may possess at least about 50%, at least about 55%, at least about 60%, at least about 65%, at least about 70%, at least about 75%, at least about 80%, at least about 85%, at least about 90%, at least about 95%, at least about 96%, at least about 97%, at least about 98%, at least about 99%, at least about 99.5% or at least about 99.9% identity (homology) to a native or reference sequence.

[0287] In some embodiments “variant mimics” are provided. As used herein, the term “variant mimic” refers to a variant which contains one or more amino acids which would mimic an activated sequence. For example, glutamate may serve as a mimic for phospho-threonine and/or phospho-serine. Alternatively, variant mimics may result in deactivation or in an inactivated product containing the mimic, e.g., phenylalanine may act as an inactivating substitution for tyrosine; or alanine may act as an inactivating substitution for serine. The amino acid sequences of the compounds and/or compositions of the invention may comprise naturally occurring amino acids and as such may be considered to be proteins, peptides, polypeptides, or fragments thereof. Alternatively, the compounds and/or compositions may comprise both naturally and non-naturally occurring amino acids.

[0288] As used herein, the term “amino acid sequence variant” refers to molecules with some differences in their amino acid sequences as compared to a native or starting sequence. The amino acid sequence variants may possess substitutions, deletions, and/or insertions at certain positions within the amino acid sequence. As used herein, the terms “native” or “starting” when referring to sequences are relative terms referring to an original molecule against which a comparison may be made. Native or starting sequences should not be confused with wild type sequences. Native sequences or molecules may represent the wild-type (that sequence found in nature) but do not have to be identical to the wild-type sequence.

[0289] Ordinarily, variants will possess at least about 70% homology to a native sequence, and preferably, they will be at least about 80%, more preferably at least about 90% homologous to a native sequence.

[0290] As used herein, the term “homology” as it applies to amino acid sequences is defined as the percentage of residues in the candidate amino acid sequence that are identical with the residues in the amino acid sequence of a second sequence after aligning the sequences and introducing gaps, if necessary, to achieve the maximum percent homology. Methods and computer programs for the alignment are well known in the art. It is understood that homology depends on a calculation of percent identity but may differ in value due to gaps and penalties introduced in the calculation.

[0291] As used herein, the term “homolog” as it applies to amino acid sequences is meant the corresponding sequence of other species having substantial identity to a second sequence of a second species.

[0292] As used herein, the term “analog” is meant to include polypeptide variants which differ by one or more amino acid alterations, e.g., substitutions, additions or deletions of amino acid residues that still maintain the properties of the parent polypeptide.

[0293] As used herein, the term “derivative” is used synonymously with the term “variant” and refers to a molecule that has been modified or changed in any way relative to a reference molecule or starting molecule.

[0294] The present invention contemplates several types of compounds and/or compositions which are amino acid based including variants and derivatives. These include substitutional, insertional, deletional and covalent variants and derivatives. As such, included within the scope of this invention are compounds and/or compositions comprising substitutions, insertions, additions, deletions and/or covalent modifications. For example, sequence tags or amino acids, such as one or more lysines, can be added to peptide sequences of the invention (e.g., at the N-terminal or C-terminal ends). Sequence tags can be used for peptide purification or localization. Lysines can be used to increase peptide solubility or to allow for biotinylation. In some cases, amino acid sequences may be included that are targets for biotinylation (e.g. via bacterial ligase). Such sequences may include any of those listed in U.S. Pat. No. 5,723,584, the contents of which are herein incorporated by reference in their entirety. For example, the amino acid sequence GLNDIFEAQKIEWHE (SEQ ID NO: 332) may be used, where the biotin is joined via bacterial ligase to the embedded lysine residue. In addition, antibodies specific for GLNDIFEAQKIEWHE (SEQ ID NO: 332) may be used to target proteins expressing that sequence. In some cases, these sequences are expressed in association with N- and/or C-terminal secretion signal sequences [e.g. human Ig kappa chains with amino acid sequence MDMRVPAQLLGLLLLWFSGVLG (SEQ ID NO: 99)], flag tag sequences [e.g. DYKDDDDK (SEQ ID NO: 100)], one or more 3C protease cleavage site [e.g. LEVLFQGP (SEQ ID NO: 101)], one or more biotinylation site and/or His-tag sequences [e.g. HHHHHH (SEQ ID NO: 102)].

[0295] Amino acid residues located at the carboxy and amino terminal regions of the amino acid sequence of a peptide or protein may optionally be deleted providing for truncated sequences. Certain amino acids (e.g., C-terminal or N-terminal residues) may alternatively be deleted depending on the use of the sequence, as for example, expression of the sequence as part of a larger sequence which is soluble, or linked to a solid support.

[0296] “Substitutional variants” when referring to proteins are those that have at least one amino acid residue in a native or starting sequence removed and a different amino acid inserted in its place at the same position. The substitutions may be single, where only one amino acid in the molecule has been substituted, or they may be multiple, where two or more amino acids have been substituted in the same molecule.

[0297] As used herein, the term “conservative amino acid substitution” refers to the substitution of an amino acid that is normally present in the sequence with a different amino acid of similar size, charge, or polarity. Examples of conservative substitutions include the substitution of a non-polar (hydrophobic) residue such as isoleucine, valine and leucine for another non-polar residue. Likewise, examples of conservative substitutions include the substitution of one polar (hydrophilic) residue for another such as between arginine and lysine, between glutamine and asparagine, and between glycine and serine. Additionally, the substitution of a basic residue such as lysine, arginine or histidine for another, or the substitution of one acidic residue such as aspartic acid or glutamic acid for another acidic residue are additional examples of conservative substitutions. Examples of non-conservative substitutions include the substitution of a non-polar (hydrophobic) amino acid residue such as isoleucine, valine, leucine, alanine, methionine for a polar (hydrophilic) residue such as cysteine, glutamine, glutamic acid or lysine and/or a polar residue for a non-polar residue.

[0298] As used herein, the term “insertional variants” when referring to proteins are those with one or more amino acids inserted immediately adjacent to an amino acid at a particular position in a native or starting sequence. As used herein, the term “immediately adjacent” refers to an adjacent amino acid that is connected to either the alpha-carboxy or alpha-amino functional group of a starting or reference amino acid.

[0299] As used herein, the term “deletional variants” when referring to proteins, are those with one or more amino acids in the native or starting amino acid sequence removed. Ordinarily, deletional variants will have one or more amino acids deleted in a particular region of the molecule.

[0300] As used herein, the term “derivatives,” as referred to herein includes variants of a native or starting protein comprising one or more modifications with organic proteinaceous or non-proteinaceous derivatizing agents, and post-translational modifications. Covalent modifications are traditionally introduced by reacting targeted amino acid residues of the protein with an organic derivatizing agent that is capable of reacting with selected side-chains or terminal residues, or by harnessing mechanisms of post-translational modifications that function in selected recombinant host cells. The resultant covalent derivatives are useful in programs directed at identifying residues important for biological activity, for immunoassays, or for the preparation of anti-protein antibodies for immunoaffinity purification of the recombinant glycoprotein. Such modifications are within the ordinary skill in the art and are performed without undue experimentation.

[0301] Certain post-translational modifications are the result of the action of recombinant host cells on the expressed polypeptide. Glutaminyl and asparaginyl residues are frequently post-translationally deamidated to the corresponding glutamyl and aspartyl residues. Alternatively, these residues are deamidated under mildly acidic conditions. Either form of these residues may be present in the proteins used in accordance with the present invention.

[0302] Other post-translational modifications include hydroxylation of proline and lysine, phosphorylation of hydroxyl groups of seryl or threonyl residues, methylation of the alpha-amino groups of lysine, arginine, and histidine side chains (T. E. Creighton, Proteins: Structure and Molecular Properties, W.H. Freeman & Co., San Francisco, pp. 79-86 (1983)).

[0303] Covalent derivatives specifically include fusion molecules in which proteins of the invention are covalently bonded to a non-proteinaceous polymer. The non-proteinaceous polymer ordinarily is a hydrophilic synthetic polymer, i.e. a polymer not otherwise found in nature. However, polymers which exist in nature and are produced by recombinant or in vitro methods are useful, as are polymers which are isolated from nature. Hydrophilic polyvinyl polymers fall within the scope of this invention, e.g. polyvinylalcohol and polyvinylpyrrolidone. Particularly useful are polyvinylalkylene ethers such a polyethylene glycol, polypropylene glycol. The proteins may be linked to various non-proteinaceous polymers, such as polyethylene glycol, polypropylene glycol or polyoxyalkylenes, in the manner set forth in U.S. Pat. Nos. 4,640,835; 4,496,689; 4,301,144; 4,670,417; 4,791,192 or 4,179,337.

[0304] As used herein, the term “features” when referring to proteins are defined as distinct amino acid sequence-based components of a molecule. Features of the proteins of the present invention include surface manifestations, local conformational shape, folds, loops, half-loops, domains, half-domains, sites, termini or any combination thereof.

[0305] As used herein, the term “surface manifestation” when referring to proteins refers to a polypeptide based component of a protein appearing on an outermost surface.

[0306] As used herein, the term “local conformational shape” when referring to proteins refers to a polypeptide based structural manifestation of a protein which is located within a definable space of the protein.

[0307] As used herein, the term “fold”, when referring to proteins, refers to the resultant conformation of an amino acid sequence upon energy minimization. A fold may occur at the secondary or tertiary level of the folding process. Examples of secondary level folds include beta sheets and alpha helices. Examples of tertiary folds include domains and regions formed due to aggregation or separation of energetic forces. Regions formed in this way include hydrophobic and hydrophilic pockets, and the like.

[0308] As used herein, the term “turn” as it relates to protein conformation, refers to a bend which alters the direction of the backbone of a peptide or polypeptide and may involve one, two, three or more amino acid residues.

[0309] As used herein, the term “loop,” when referring to proteins, refers to a structural feature of a peptide or polypeptide which reverses the direction of the backbone of a peptide or polypeptide and comprises four or more amino acid residues. Oliva et al. have identified at least 5 classes of protein loops (Oliva, B. et al., An automated classification of the structure of protein loops. J Mol Biol. 1997. 266(4):814-30).

[0310] As used herein, the term “half-loop,” when referring to proteins, refers to a portion of an identified loop having at least half the number of amino acid resides as the loop from which it is derived. It is understood that loops may not always contain an even number of amino acid residues. Therefore, in those cases where a loop contains or is identified to comprise an odd number of amino acids, a half-loop of the odd-numbered loop will comprise the whole number portion or next whole number portion of the loop (number of amino acids of the loop/2+/−0.5 amino acids). For example, a loop identified as a 7 amino acid loop could produce half-loops of 3 amino acids or 4 amino acids (7/2=3.5+/−0.5 being 3 or 4).

[0311] As used herein, the term “domain,” when referring to proteins, refers to a motif of a polypeptide having one or more identifiable structural or functional characteristics or properties (e.g., binding capacity, serving as a site for protein-protein interactions).

[0312] As used herein, the term “half-domain,” when referring to proteins, refers to a portion of an identified domain having at least half the number of amino acid resides as the domain from which it is derived. It is understood that domains may not always contain an even number of amino acid residues. Therefore, in those cases where a domain contains or is identified to comprise an odd number of amino acids, a half-domain of the odd-numbered domain will comprise the whole number portion or next whole number portion of the domain (number of amino acids of the domain/2+/−0.5 amino acids). For example, a domain identified as a 7 amino acid domain could produce half-domains of 3 amino acids or 4 amino acids (7/2=3.5+/−0.5 being 3 or 4). It is also understood that sub-domains may be identified within domains or half-domains, these subdomains possessing less than all of the structural or functional properties identified in the domains or half domains from which they were derived. It is also understood that the amino acids that comprise any of the domain types herein need not be contiguous along the backbone of the polypeptide (i.e., nonadjacent amino acids may fold structurally to produce a domain, half-domain or subdomain).

[0313] As used herein, the terms “site,” as it pertains to amino acid based embodiments is used synonymously with “amino acid residue” and “amino acid side chain”. A site represents a position within a peptide or polypeptide that may be modified, manipulated, altered, derivatized or varied within the polypeptide based molecules of the present invention.

[0314] As used herein, the terms “termini” or “terminus,” when referring to proteins refers to an extremity of a peptide or polypeptide. Such extremity is not limited only to the first or final site of the peptide or polypeptide but may include additional amino acids in the terminal regions. The polypeptide based molecules of the present invention may be characterized as having both an N-terminus (terminated by an amino acid with a free amino group (NH2)) and a C-terminus (terminated by an amino acid with a free carboxyl group (COOH)). Proteins of the invention are in some cases made up of multiple polypeptide chains brought together by disulfide bonds or by non-covalent forces (multimers, oligomers). These sorts of proteins will have multiple N- and C-termini. Alternatively, the termini of the polypeptides may be modified such that they begin or end, as the case may be, with a non-polypeptide based moiety such as an organic conjugate.

[0315] Once any of the features have been identified or defined as a component of a molecule of the invention, any of several manipulations and/or modifications of these features may be performed by moving, swapping, inverting, deleting, randomizing or duplicating. Furthermore, it is understood that manipulation of features may result in the same outcome as a modification to the molecules of the invention. For example, a manipulation which involved deleting a domain would result in the alteration of the length of a molecule just as modification of a nucleic acid to encode less than a full length molecule would.

[0316] Modifications and manipulations can be accomplished by methods known in the art such as site directed mutagenesis. The resulting modified molecules may then be tested for activity using in vitro or in vivo assays such as those described herein or any other suitable screening assay known in the art.

[0317] In some embodiments, compounds and/or compositions of the present invention may comprise one or more atoms that are isotopes. As used herein, the term “isotope” refers to a chemical element that has one or more additional neutrons. In some embodiments, compounds of the present invention may be deuterated. As used herein, the term “deuterate” refers to the process of replacing one or more hydrogen atoms in a substance with deuterium isotopes. Deuterium isotopes are isotopes of hydrogen. The nucleus of hydrogen contains one proton while deuterium nuclei contain both a proton and a neutron. The compounds and/or compositions of the present invention may be deuterated in order to change one or more physical property, such as stability, or to allow compounds and/or compositions to be used in diagnostic and/or experimental applications.

### Conjugates and Combinations

[0318] It is contemplated by the present invention that the compounds and/or compositions of the present invention may be complexed, conjugated or combined with one or more homologous or heterologous molecules. As used herein, the term “homologous molecule” refers to a molecule which is similar in at least one of structure or function relative to a starting molecule while a “heterologous molecule” is one that differs in at least one of structure or function relative to a starting molecule. Structural homologs are therefore molecules which may be substantially structurally similar. In some embodiments, such homologs may be identical. Functional homologs are molecules which may be substantially functionally similar. In some embodiments, such homologs may be identical.

[0319] Compounds and/or compositions of the present invention may comprise conjugates. Such conjugates of the invention may include naturally occurring substances or ligands, such as proteins (e.g., human serum albumin (HSA), low-density lipoprotein (LDL), high-density lipoprotein (HDL), or globulin); carbohydrates (e.g., a dextran, pullulan, chitin, chitosan, inulin, cyclodextrin or hyaluronic acid); or lipids. Conjugates may also be recombinant or synthetic molecules, such as synthetic polymers, e.g., synthetic polyamino acids, an oligonucleotide (e.g. an aptamer). Examples of polyamino acids may include polylysine (PLL), poly L-aspartic acid, poly L-glutamic acid, styrene-maleic acid anhydride copolymer, poly(L-lactide-co-glycolied) copolymer, divinyl ether-maleic anhydride copolymer, N-(2-hydroxypropyl)methacrylamide copolymer (HMPA), polyethylene glycol (PEG), polyvinyl alcohol (PVA), polyurethane, poly(2-ethylacryllic acid), N-isopropylacrylamide polymers, or polyphosphazine. Example of polyamines include: polyethylenimine, polylysine (PLL), spermine, spermidine, polyamine, pseudopeptide-polyamine, peptidomimetic polyamine, dendrimer polyamine, arginine, amidine, protamine, cationic lipid, cationic porphyrin, quaternary salt of a polyamine, or an alpha helical peptide.

[0320] In some embodiments, conjugates may also include targeting groups. As used herein, the term “targeting group” refers to a functional group or moiety attached to an agent that facilitates localization of the agent to a desired region, tissue, cell and/or protein. Such targeting groups may include, but are not limited to cell or tissue targeting agents or groups (e.g. lectins, glycoproteins, lipids, proteins, an antibody that binds to a specified cell type such as a kidney cell or other cell type). In some embodiments, targeting groups may comprise thyrotropins, melanotropins, lectins, glycoproteins, surfactant protein A, mucin carbohydrates, multivalent lactose, multivalent galactose, N-acetyl-galactosamine, N-acetyl-gulucosamine, multivalent mannose, multivalent fucose, glycosylated polyaminoacids, multivalent galactose, transferrin, bisphosphonate, polyglutamate, polyaspartate, lipids, cholesterol, steroids, bile acids, folates, vitamin B12, biotin, an RGD peptide, an RGD peptide mimetic or an aptamer.

[0321] In some embodiments, targeting groups may be proteins, e.g., glycoproteins, or peptides, e.g., molecules having a specific affinity for a co-ligand, or antibodies e.g., an antibody, that binds to a specified cell type such as a cancer cell, endothelial cell, or bone cell. Targeting groups may also comprise hormones and/or hormone receptors.

[0322] In some embodiments, targeting groups may be any ligand capable of targeting specific receptors. Examples include, without limitation, folate, GalNAc, galactose, mannose, mannose-6-phosphate, apatamers, integrin receptor ligands, chemokine receptor ligands, transferrin, biotin, serotonin receptor ligands, PSMA, endothelin, GCPII, somatostatin, LDL, and HDL ligands. In some embodiments, targeting groups are aptamers. Such aptamers may be unmodified or comprise any combination of modifications disclosed herein.

[0323] In still other embodiments, compounds and/or compositions of the present invention may be covalently conjugated to cell penetrating polypeptides. In some embodiments, cell-penetrating peptides may also include signal sequences. In some embodiments, conjugates of the invention may be designed to have increased stability, increased cell transfection and/or altered biodistribution (e.g., targeted to specific tissues or cell types).

[0324] In some embodiments, conjugating moieties may be added to compounds and/or compositions of the present invention such that they allow the attachment of detectable labels to targets for clearance. Such detectable labels include, but are not limited to biotin labels, ubiquitins, fluorescent molecules, human influenza hemaglutinin (HA), c-myc, histidine (His), flag, glutathione S-transferase (GST), V5 (a paramyxovirus of simian virus 5 epitope), biotin, avidin, streptavidin, horse radish peroxidase (HRP) and digoxigenin.

[0325] In some embodiments, compounds of the invention may be conjugated with an antibody Fc domain to create an Fc fusion protein. The formation of an Fc fusion protein with any of the compounds described herein may be carried out according to any method known in the art, including as described in U.S. Pat. Nos. 5,116,964, 5,541,087 and 8,637,637, the contents of each of which are herein incorporated by reference in their entirety. Fc fusion proteins of the invention may comprise a compound of the invention linked to the hinge region of an IgG Fc via cysteine residues in the Fc hinge region. Resulting Fc fusion proteins may comprise an antibody-like structure, but without Cm domains or light chains. In some cases, Fc fusion proteins may comprise pharmacokinetic profiles comparable to native antibodies. In some cases, Fc fusion proteins of the invention may comprise extended half-life in circulation and/or altered biological activity.

[0326] In some embodiments, compounds and/or compositions of the present invention may be combined with one another or other molecules in the treatment of diseases and/or conditions.

### Nucleic Acids

[0327] In some embodiments, compounds and/or compositions of the present invention may be encoded by nucleic acid molecules. Such nucleic acid molecules include, without limitation, DNA molecules, RNA molecules, polynucleotides, oligonucleotides, mRNA molecules, vectors, plasmids and the like. In some embodiments, the present invention may comprise cells programmed or generated to express nucleic acid molecules encoding compounds and/or compositions of the present invention. In some cases, nucleic acids of the invention include codon-optimized nucleic acids. Methods of generating codon-optimized nucleic acids are known in the art and may include, but are not limited to those described in U.S. Pat. Nos. 5,786,464 and 6,114,148, the contents of each of which are herein incorporated by reference in their entirety.

### Methods of Use

[0328] Methods of the present invention include methods of modifying growth factor activity in one or more biological system. Such methods may include contacting one or more biological system with a compound and/or composition of the invention. In some cases, these methods include modifying the level of free growth factor in a biological system (e.g. in a cell niche or subject). Compounds and/or compostions according to such methods may include, but are not limited to biomolecules, including, but not limited to recombinant proteins, protein complexes and/or antibodies described herein.

[0329] In some embodiments, methods of the present invention may be used to initiate or increase growth factor activity, termed “activating methods” herein. Some such methods may comprise growth factor release from a GPC and/or inhibition of growth factor reassociation into a latent GPC. In some cases, activating methods may comprise the use of an antibody, a recombinant protein and/or a protein complex. According to some activating methods, one or more activating antibody is provided. In such methods, one or more growth factor may be released or prevented from being drawn back into a GPC. In one, non-limiting example, an anti-LAP antibody may be provided that enhances dissociation between a growth factor and a GPC and/or prevents reformation of a GPC.

[0330] Embodiments of the present invention include methods of using anti-LAP and/or anti-LAP-like domain antibodies to modify growth factor activity. In some cases, such methods may include the use of anti-TGF-β-LAP antibodies as TGF-β-activating antibodies. In some cases, methods of using and/or testing such antibodies may include any of the methods taught in Tsang, M. et al. 1995. Cytokine 7(5):389-97, the contents of which are herein incorporated by reference in their entirety. In some embodiments, these methods may include the use of commercially available anti-TGF-β LAP antibodies, including, but not limited to MAB246 or MAB2463 (R&D Systems, Minneapolis, Minn.). MAB246 and MAB2463 antibodies are mouse IgG1 antibodies from clone #s 27235 and 27232, respectively, raised against Sf21-expressed human TGF-β1 LAP C4S. In some cases, such methods may be used to specifically target LTBP-associated proTGF-β to increase TGF-β activity. Such specific targeting may be aided in some cases by an increased stabilization of proTGF-β GPCs when associated with GARP. In some cases, MAB246 and/or MAB2463 may be used synergistically with other TGF-β activators (e.g. αvβ₆, αvβ₈ and/or other activating antibodies) to increase TGF-β activity.

[0331] In some embodiments, methods of the present invention may be used to reduce or eliminate growth factor activity, termed “inhibiting methods” herein. Some such methods may comprise growth factor retention in a GPC and/or promotion of reassociation of growth factor into a latent GPC. In some cases, inhibiting methods may comprise the use of an antibody, a recombinant protein and/or a protein complex. According to some inhibiting methods, one or more inhibiting antibody is provided. In some cases, inhibiting methods comprise the use of inhibiting recombinant proteins or inhibiting protein complexes capable of association with a growth factor, wherein the association prevents growth factor activity.

[0332] In some embodiments, inhibiting recombinant proteins may comprise recombinant LAP or LAP-like proteins. Such proteins may be capable of binding free growth factor to form GPCs and reducing the ratio of free growth factor to latent growth factor. In some cases, such proteins may be provided as part of a protein complex with LTBP1, LTBP1S, LTBP2, LTBP3, LTBP4, fibrillin-1, fibrillin-2, fibrillin-3, fibrillin-4, GARP, LRRC33 and/or an extracellular matrix and/or cellular matrix component.

[0333] In some embodiments, inhibiting protein complexes may include TGF-β LAP complexed with an LTBP protein. Such protein complexes may provide dual functions. In one function, LAP-LTBP protein complexes may bind free TGF-β, preventing TGF-β activity. In a second function, such complexes may function as targeting complexes, wherein the LTBP portion of such complexes may target the complexes to areas of the extracellular matrix known to associate with LTBP.

### Targeting Complexes

[0334] In some embodiments methods of the present invention may comprise the use of one or more targeting complex. As used herein, the term “targeting complex” refers to a protein complex wherein at least one protein component acts as a targeting agent. As used herein, the term “targeting agent” refers to an agent that directs cargo or other components complexed with the agent to a target site.

[0335] In some cases, targeting complexes may comprise one or more extracellular matrix proteins and/or proteins associated with the extracellular matrix. Such proteins may function as targeting agents in a targeting complex. According to such embodiments, the extracellular matrix component of a targeting complex may direct the complex to target sites comprising extracellular matrix and/or cellular matrix. Extracellular matrix components of targeting complexes may include, but are not limited to LTBPs (e.g. LTBP1, LTBP2, LTBP3 and/or LTBP4), fibrillins (e.g. fibrillin-1, fibrillin-2, fibrillin-3 and/or fibrillin-4), perlecan, decorin, elastin, collagen, GASP proteins and/or GARPs (e.g. GARP and/or LRRC33).

[0336] In some embodiments, LTBP isoforms may be used as targeting agents to direct targeting complexes to areas of extra cellular matrix surrounding different tissues. LTBP1, for example, has been shown to be expressed predominantly in the heart, lung, kidney, placenta, spleen and stomach. As such, targeting complexes may be directed to those organs by incorporation of LTBP1 as a targeting agent. Similarly, LTBP2 is found in the lung, skeletal muscle, liver and placenta while LTBP3 and LTBP4 are both known to be expressed in the skeletal muscle, heart, ovaries and small intestine (Ceco, E. 2013. FEBS J. 280(17):4198-209, the contents of which are herein incorporated by reference in their entirety). These differential regions of expression may be target sites for targeting complexes in which LTBP2, 3 or 4 isoforms may be used as targeting agents.

[0337] Some targeting complexes of the invention may comprise one or more prodomain component, such as a LAP or LAP-like domain. In some cases, the portion of such targeting complexes may function to bind free growth factors to reduce free growth factor levels and/or activity. In some cases, TGF-β LAP may be included in targeting complexes. LAP from TGF-β1, 2 or 3 may bind to TGF-β1, 2 or 3 growth factor, respectively. Targeting complexes comprising TGF-β LAP may be used to reduce free TGF-β growth factor levels and/or activity. In some cases, such targeting complexes may comprise an LTBP isoform as a targeting agent. LTBP-LAP targeting complexes may be used to reduce growth factor activity in one or more target site while leaving growth factor activity unaffected in non-target areas. Such targeting complexes may be useful where regional growth factor modulation is desired over systemic growth factor modulation.

### Therapeutics

[0338] In some embodiments, compositions and methods of the invention may be used to treat a wide variety of diseases, disorders and/or conditions. In some cases, such diseases, disorders and/or conditions may be TGF-β-related indications. As used herein, the term “TGF-β-related indication” refers to any disease, disorder and/or condition related to expression, activity and/or metabolism of a TGF-β family member protein or any disease, disorder and/or condition that may benefit from modulation of the activity and/or levels of one or more TGF-β family member protein. TGF-β-related indications may include, but are not limited to, fibrosis, anemia of the aging, cancer (including, but not limited to colon, renal, breast, malignant melanoma and glioblastoma), facilitation of rapid hematopoiesis following chemotherapy, bone healing, wound healing, tooth loss and/or degeneration, endothelial proliferation syndromes, asthma and allergy, gastrointestinal disorders, aortic aneurysm, orphan indications (such as Marfan's syndrome and Camurati-Engelmann disease), obesity, diabetes, arthritis, multiple sclerosis, muscular dystrophy, amyotrophic lateral sclerosis (ALS), Parkinson's disease, osteoporosis, osteoarthritis, osteopenia, metabolic syndromes, nutritional disorders, organ atrophy, chronic obstructive pulmonary disease (COPD), and anorexia. Additional indications may include any of those disclosed in US Pub. No. 2013/0122007, U.S. Pat. No. 8,415,459 or International Pub. No. WO 2011/151432, the contents of each of which are herein incorporated by reference in their entirety.

[0339] Efficacy of treatment or amelioration of disease can be assessed, for example by measuring disease progression, disease remission, symptom severity, reduction in pain, quality of life, dose of a medication required to sustain a treatment effect, level of a disease marker or any other measurable parameter appropriate for a given disease being treated or targeted for prevention. It is well within the ability of one skilled in the art to monitor efficacy of treatment or prevention by measuring any one of such parameters, or any combination of parameters. In connection with the administration of compositions of the present invention, “effective against” for example a cancer, indicates that administration in a clinically appropriate manner results in a beneficial effect for at least a statistically significant fraction of patients, such as an improvement of symptoms, a cure, a reduction in disease load, reduction in tumor mass or cell numbers, extension of life, improvement in quality of life, or other effect generally recognized as positive by medical doctors familiar with treating the particular type of cancer.

[0340] A treatment or preventive effect is evident when there is a statistically significant improvement in one or more parameters of disease status, or by a failure to worsen or to develop symptoms where they would otherwise be anticipated. As an example, a favorable change of at least 10% in a measurable parameter of disease, and preferably at least 20%, 30%, 40%, 50% or more can be indicative of effective treatment. Efficacy for a given composition or formulation of the present invention can also be judged using an experimental animal model for the given disease as known in the art. When using an experimental animal model, efficacy of treatment is evidenced when a statistically significant change is observed.

### Therapeutics for Fibrosis

[0341] In some embodiments, compounds and/or compositions of the present invention may be useful for altering fibrosis. In some embodiments, such compounds and/or compositions are antagonists of TGF-β. TGF-β is recognized as the central orchestrator of the fibrotic response. Antibodies targeting TGF-β decrease fibrosis in numerous preclinical models. Such antibodies and/or antibody-based compounds include LY2382770 (Eli Lilly, Indianapolis, Ind.). Also included are those described in U.S. Pat. No. 6,492,497, U.S. Pat. No. 7,151,169 and U.S. Pat. No. 7,723,486 and U.S. publication US2011/0008364, the contents of each of which are herein incorporated by reference in their entirety.

[0342] Fibrosis is a common sequela of many types of tissue destructive diseases. When new space is created by the disruption of differentiated cells, progenitors or stem cells that normally occupy a niche in the tissue, the default pathway appears to be the proliferation of connective tissue cells, e.g. fibroblasts, to fill in the empty space. This is accompanied by the production of extracellular matrix constituents including collagens that result in scarring and permanent effacement of the tissue.

[0343] A difficult aspect of fibrosis is its chronicity, which may require continued therapy until the underlying destruction of parenchymal cells is terminated or the cells are replaced by stem cell pools, or by transplantation. Fibrosis is thought to be much easier to arrest than to reverse. The TGF-beta family is of central importance in regulating the growth of fibroblastic cells and the production of extracellular matrix constituents including collagen. Integrins αᵥβ₆ and αᵥβ₈ (and possibly αᵥβ₁) may participate in activation of TGF-beta1 and 3. The integrin VLA-1 is a receptor for collagen and is expressed on lymphocytes only late after their activation and is strongly implicated in the development of fibrotic disease.

[0344] In some embodiments, compounds and/or compositions of the present invention are designed to block integrin αᵥβ₆, αᵥβ₈ and αᵥβ₁ activation of TGF-beta for inhibiting fibrosis. In some embodiments, compounds and/or compositions of the present invention are designed to target interaction sites between GPCs and LTBPs while leaving interaction sites between GPCs and GARP unaffected. Such compounds and/or compositions of the present invention may act as inhibitory antibodies, preventing growth factor signaling and inhibiting fibrosis. In some embodiments, compounds and/or compositions of the present invention are designed to target one or more of TGF-β1, 2 and 3 or chimeric antigens thereof.

[0345] Fibrotic indications for which compounds and/or compositions of the present invention may be used therapeutically include, but are not limited to lung indications [e.g. Idiopathic Pulmonary Fibrosis (IPF), Chronic Obstructive Pulmonary Disorder (COPD), Allergic Asthma, Acute Lung injury, Eosinophilic esophagitis, Pulmonary arterial hypertension and Chemical gas-injury,] kidney indications [e.g. Diabetic glomerulosclerosis, Focal segmental glomeruloclerosis (FSGS), Chronic kidney disease, Fibrosis associated with kidney transplantation and chronic rejection, IgA nephropathy and Hemolytic uremic syndrome,] liver fibrosis [e.g. Non-alcoholic steatohepatitis (NASH), Chronic viral hepatitis, Parasitemia, Inborn errors of metabolism, Toxin-mediated fibrosis, such as alcohol fibrosis, Non-alcoholic steatohepatitis-hepatocellular carcinoma (NASH-HCC), Primary biliary cirrhosis and Sclerosing cholangitis,] cardiovascular fibrosis (e.g. cardiomyopathy, hypertrophic cardiomyopathy, atherosclerosis and restenosis), systemic sclerosis, skin fibrosis (e.g. Skin fibrosis in systemic sclerosis, Diffuse cutaneous systemic sclerosis, Scleroderma, Pathological skin scarring, Keloid, Post surgical scarring, Scar revision surgery, Radiation-induced scarring and Chronic wounds) and cancers or secondary fibrosis (e.g. Myelofibrosis, Head and Neck Cancer, M7 acute Megakaryoblastic Leukemia and Mucositis). Other diseases, disorders or conditions related to fibrosis that may be treated using compounds and/or compositions of the present invention, include, but are not limited to Marfan's Syndrome, Stiff Skin Syndrome, Scleroderma, Rheumatoid arthritis, bone marrow fibrosis, Crohn's disease, Ulcerative colitis, Systemic lupus erythematosus, Muscular Dystrophy, Dupuytren's contracture, Camurati-Engelmann Disease, Neural scarring, Proliferative vitreoretinopathy, corneal injury, complications after glaucoma drainage surgery and Multiple Sclerosis.

[0346] Assays useful in determining the efficacy of the compounds and/or compositions of the present invention for the alteration of fibrosis include, but are not limited to, histological assays for counting fibroblasts and basic immunohistochemical analyses known in the art.

[0347] Animal models are also available for analysis of the efficacy of compounds and/or compositions of the present invention in altering fibrosis. Examples of animal fibrosis models useful for such analysis may include, for example, any of those taught by Schaefer, D. W. et al., 2011. Eur Respir Rev. 20: 120, 85-97, the contents of which are herein incorporated by reference in their entirety. Such models may include, but are not limited to those described in Table 1 of that publication, including lung models, renal models, liver models, cardiovascular models and/or collagen-induced models. Schaefer et al also teach the use of pirfenidone in the treatment of fibrosis. In some cases, compounds and/or compositions of the present invention may be used in combination with pirfenidone.

[0348] In some cases, compounds and/or composition of the invention may be used in the treatment of lung fibrosis. Lung fibrosis models may be used in the development and/or testing of compounds and/or compositions of the invention. Lung fibrosis models may include the bleomycin induced lung injury models and/or chronic bleomycin induced lung injury models. Bleomycin induced lung injury models may be carried out as described by Schaefer et al, and also by Horan et al. (Horan G. S. et al., 2008. Am J Respir Crit Care Med, 177(1):56-65. Epub 2007 Oct. 4, the contents of each of which are herein incorporated by reference in their entirety). According to the Horan study, SV129 mice are tracheally exposed to bleomycin which results in the development of lung fibrosis. With this model, potential therapeutics are administered through intraperitoneal injections while postmortem lung tissue or bronchoalveolar lavage collections can be assayed for levels of hydroxyproline as an indicator of fibrotic activity. Using the same technique, mice carrying a luciferase reporter gene, driven by the collagen Iα2 gene promoter may be used in the model so that fibrotic activity may be determined by luciferase activity assay as a function of collagen gene induction. Additional bleomycin induced lung models may be carried out according to those described by Thrall et al (Thrall, R. S. et al., 1979. Am J Pathol. 95:117-30, the contents of which are herein incorporated by reference in their entirety). Additional lung models may include the mouse asthma models. Airway remodeling (lung fibrosis) may be a serious problem in subjects with chronic asthma. Asthma models may include any of those described by Nials et al (Nials, A. T. et al., 2008. Disease Models and Mechanisms. 1:213-20, the contents of which are herein incorporated by reference in their entirety). Models of chronic obstructive pulmonary disease (COPD) may be used. Such models may include any of those described by Vlahos et al (Vlahos, R. et al., 2014. Clin Sci. 126:253-65, the contents of which are herein incorporated by reference in their entirety). Models of cigarette smoking emphysema may be used. Such models may be carried out as described in Ma et al. 2005. J Clin Invest. 115:3460-72, the contents of which are herein incorporated by reference in their entirety. Models of chronic pulmonary fibrosis may be used. Such models in rodents may be carried out according to the intratracheal fluorescein isothiocyanate (FITC) instillation model described in Roberts, S. N. et al. 1995. J Pathol. 176(3):309-18, the contents of which are herein incorporated by reference in their entirety. Models of asbestos and silica induced lung injury may also be used. Such models may be carried out as described in Coin, P. G. et al., 1996. Am J Respir Crit Care Med. 154(5):1511-9, the contents of which are herein incorporated by reference in their entirety. In some cases, models of lung irradiation may be used. Such models may be carried out as described in Pauluhn, J. et al. 2001. Toxicology. 161:153-63, the contents of which are herein incorporated by reference in their entirety. In some cases, phorbol myristate acetate (PMA)-induced lung injury models may be used. Such models may be carried out as described in Taylor, R. G. et al., 1985. Lab Invest. 52(1):61-70, the contents of which are herein incorporated by reference in their entirety.

[0349] Renal fibrosis models may be utilized to develop and/or test compounds and/or compositions of the present invention. In some embodiments, a well established model of renal fibrosis, unilateral ureteral obstruction (UUO) model, may be used. In this model, mice are subjected to proximal ureteral ligation. After a period of hours to days, fibrosis is examined in the regions blocked by ligation (Ma, L. J. et al., 2003. American Journal of Pathology. 163(4):1261-73, the contents of which are herein incorporated by reference in their entirety). In one example, this method was utilized by Meng, X. M. et al. (Meng, X. M. et al., Smad2 Protects against TGF-beta/Smad3-Mediated Renal Fibrosis. J Am Soc Nephrol. 2010 September; 21(9):1477-87. Epub 2010 Jul. 1) to examine the role of SMAD-2 in renal fibrosis. SMAD-2 is an intracellular member of the TGF-beta cell signaling pathway. In some cases, cyclosporine A-induced nephropathy models may be used. Such models may be carried out as described in Ling, H. et al., 2003. J Am Soc Nephrol. 14:377-88, the contents of which are herein incorporated by reference in their entirety. In some cases, renal models of Alport Syndrome may be used. Transgenic mice with collagen III knockout may be used in Alport syndrome studies. These mice develop progressive fibrosis in their kidneys. Alport syndrome models may be carried out as described in Koepke, M. L. et al., 2007. Nephrol Dial Transplant. 22(4):1062-9 and/or Hahm, K. et al., 2007. Am J Pathol. 170(1):110-5, the contents of each of which are herein incorporated by reference in their entirety.

[0350] In some cases, models of cardiovascular fibrosis may be used to develop and/or test compounds and/or compositions of the invention for treatment of cardiovascular fibrotic indications. In some cases, vascular injury models may be used. Such models may include balloon injury models. In some cases, these may be carried out as described in Smith et al., 1999. Circ Res. 84(10):1212-22, the contents of which are herein incorporated by reference in their entirety. Blocking TGF-β in this model was shown to block neointima formation. Accordingly, TGF-β inhibiting antibodies of the present invention may be used to reduce and/or block neointima formation.

[0351] In some embodiments, models of liver fibrosis may be used to develop and/or test compounds and/or compositions of the invention for treatment of liver fibrotic indications. Liver models may include any of those described in Iredale, J. P. 2007. J Clin Invest. 117(3):539-48, the contents of which are herein incorporated by reference in their entirety. These include, but are not limited to, any of the models listed in Tables 1 and/or 2 of that publication. In some cases, liver models may include carbon tetrachloride induced liver fibrosis models. Such models may be carried out according to the methods described in Fujii, T. et al., 2010. BMC Gastroenterology. 10:79, the contents of which are herein incorporated by reference in their entirety.

[0352] In some embodiments, models of wound healing may be used to develop and/or test compounds and/or compositions of the invention for treatment of fibrotic wound indications. Wound models may include chronic wound models.

[0353] In some cases, models of GI injury-related fibrosis may be used to develop and/or test compounds and/or compositions of the invention for treatment of GI-related fibrosis. Such injury models may include, but are not limited to 2,4,6-trinitrobenzenesulfonic acid (TNBS) induced colitis models. Such models may be carried out as described in Scheiffele, F. et al., 2002. Curr Protoc Immunol. Chapter 15:Unit 15.19, the contents of which are herein incorporated by reference in their entirety.

[0354] In some embodiments, compounds and/or compositions of the invention may be used to treat diseases, disorders and/or conditions related to bone marrow fibrosis. In some cases, bone marrow fibrosis models may be used to develop and/or test such compounds and/or compositions. Models may include the marrow cell adoptive transfer model described in Lacout, C. et al., 2006. Blood. 108(5):1652-60 and transgenic mouse models, including, but not limited to the model described in Vannucchi, A. M. et al., 2002. Blood. 100(4):1123-32, the contents of each of which are herein incorporated by reference in their entirety. Further models may include models of thrombopoietin-induced myelofibrosis. Such models may be carried out as described in Chagraoui, H. et al., 2002. Blood. 100(10):3495-503, the contents of which are herein incorporated by reference in their entirety.

[0355] In some embodiments, compounds and/or compositions of the invention may be used to treat diseases, disorders and/or conditions related to muscular dystrophy (MD) including, but not limited to Duchenne MD and Becker MD. In some cases MD models may be used to develop and/or test such compounds and/or compositions. Such models may include those described in Ceco, E. et al., 2013. FEBS J. 280(17):4198-209, the contents of which are herein incorporated by reference in their entirety.

[0356] Compounds and/or compositions of the invention may, in some cases, be combined with one or more other therapeutics for the treatment of one or more fibrotic indication. Examples of such other therapeutics may include, but are not limited to LPA1 receptor antagonists, lysyl oxidase 2 inhibitors, hedgehog inhibitors, IL-3/IL-4 inhibitors, CTGF inhibitors, anti-αᵥβ₆ antibodies and anti-IL-13 antibodies.

[0357] In some cases, compounds and/or compositions of the present invention are designed to increase TGF-β growth factor activity to promote fibrosis to treat diseases, disorders and/or conditions where fibrosis may be advantageous. Such compounds may include activating antibodies.

### Therapeutics for Myelofibrosis

[0358] Myelofibrosis is a chronic blood cancer caused by mutations in bone marrow stem cells. Disease is characterized by an impaired ability to make normal blood cells. Patients develop splenomegaly and hepatomegaly and excessive fibrosis occurs in the bone marrow. Myeloproliferative neoplasms (MPNs) are the collective name for three related types of myelofibrosis with different clinical features: primary myelofibrosis (PMF), essential thrombocythemia and polycythemia vera. All three have overactive signaling of the JAK-STAT cell signaling pathway (Klampfi, et al., 2013. NEJM 369:2379-90, the contents of which are herein incorporated by reference in their entirety). Primary myelofibrosis (PMF) is characterized by increased angiogenesis, reticulin and collagen fibrosis. As the disease advances, the number of osteoclasts increase and bone marrow becomes unaspirable. Some fibrosis of PMF may be reversed by stem cell transplantation (SCT). 98% of individuals with polycythemia vera have mutated JAK2 leading to overactive JAK-STAT signaling.

[0359] Current therapeutics for MPNs include allogeneic hematopoietic cell transplantation (HCT) and Janus kinase (JAK) inhibition. Allogeneic HCT is associated with up to 10% mortality as well as graft failure and significant side effects and toxicity. JAK inhibition therapy comprises the use of Ruxolitinib (Rux), a small molecule inhibitor of JAK2 that was approved in 2011 to treat MPNs. Rux is marketed under the names JAKAFI® and JAKAVI® by Incyte pharmaceuticals (Wilmington, Del.) and Novartis (Basel, Switzerland). Although able to improve splenomegaly and hepatomegaly, Rux is not curative and some studies do not show much benefit (Odenike, O., 2013. Hematology. 2013(1):545-52, the contents of which are herein incorporated by reference in their entirety).

[0360] In some cases, compounds and/or compositions of the invention may be used to treat myeloproliferative disorders, including, but not limited to primary myelofibrosis, secondary myelofibrosis, essential thrombocythemia, polycythemia vera, idiopathic myelofibrosis and chronic myeloid leukemia. In some cases, treatments may be carried out in combination with one or more known therapies for myelofibrosis, including, but not limited to allogeneic HCT, JAK inhibition, fresolimumab (GC1008; Genzyme, Cambridge, Mass.) treatment to block TGF-β1, 2 and 3 (Mascarenhas, J. et al., 2014. Leukemia and Lymphoma. 55:450-2, the contents of which are herein incorporated by reference in their entirety), simtuzumab (Gilead Biosciences, Foster City, Calif.) treatment to block lysyl oxidase activity and collagen cross-linking and Pentraxin-2 (Promedior, Lexington, Mass.) treatment to stimulate regulatory macrophages and inhibit myelofibroblasts. In some cases, models of myeloproliferative disorders may be used to develop and/or test such compounds and/or compositions of the invention intended for the treatment of myelofibrosis. Models may include the marrow cell adoptive transfer model described in Lacout, C. et al., 2006. Blood. 108(5):1652-60 and transgenic mouse models, including, but not limited to the model described in Vannucchi, A. M. et al., 2002. Blood. 100(4):1123-32, the contents of each of which are herein incorporated by reference in their entirety. Myelofibrosis models may include thrombopoietin-induced myelofibrosis. Such models may be carried out as described in Chagraoui, H. et al., 2002. Blood. 100(10):3495-503, the contents of which are herein incorporated by reference in their entirety. TGF-β1 has been shown to be the primary agonist of fibrosis according to this model. Further myelofibrosis models may be carried out as described in Mullally, A. et al., 2010. Cancer Cell. 17:584-96, the contents of which are herein incorporated by reference in their entirety.

### Therapeutics for Scarring and Wound Healing

[0361] TGF-β has been shown to be involved in wound healing and scar formation and TGF-β levels have been shown to be elevated at sites of injury (Wang, X-J. et al., 2006. J Invest Derm Symp Proc. 11:112-7; Demidova-Rice, T. et al., 2012. Adv Skin Wound Care. 25(8):349-70; Hameedaldeen, A. et al., 2014. Int J Mol Sci. 15:16257-69; Yamano, S. et al., 2013. J Craniomaxillofac Surg. 41(2):e42-8; O'Kane, S. et al., 1997. Int J Biochem Cell Biol. 29(1):63-78, the contents of each of which are herein incorporated by reference in their entirety). In some embodiments, compounds and/or compositions of the present invention may be useful in altering wound healing (including, but not limited to wounds from injury and wounds related to diabetes) and/or scar formation by modulating TGF-β levels. In some cases, compounds and/or compositions of the invention may ensure proper wound healing (including, but not limited to chronic wounds). In some cases, compounds and/or compositions of the invention may be used for reducing, treating and or preventing scar formation. Such compounds and/or compositions may comprise anti-TGF-β antibodies. In some cases, TGF-β-activating antibodies may be used to promote healing in wounds.

[0362] In some embodiments, compounds and/or compositions of the invention may be combined with alternative therapeutic approaches to wound healing and/or scar reduction. In some cases, such alternative therapeutic approaches may include electrical stimulation (see Lee, P-Y. et al., 2004. J Invest Dermatol. 123:791-8, the contents of which are herein incorporated by reference in their entirety).

[0363] Models of wound healing may be used to test compounds and/or compositions of the invention for wound modulation and/or scar formation. Such models may include any of those described in Wong, V. W. et al., 2011. J Biomed Biotechnol. 2011:969618; Wang, X-J. et al., 2006. J Invest Derm Symp Proc. 11:112-7; Demidova-Rice, T. et al., 2012. Adv Skin Wound Care. 25(8):349-70; Chesnoy, S. et al., 2003. Pharmaceutical Research. 20(3):345-50; Yamano, S. et al., 2013. J Craniomaxillofac Surg. 41(2):e42-8; Kim, H-M. et al., 1998. Pharmacol Res. 37(4):289-93, the contents of each of which are herein incorporated by reference in their entirety.

### Therapeutics for Disorders of Iron Metabolism

[0364] In some embodiments, methods, compounds and/or compositions of the present invention may be used to treat disorders of iron metabolism. Such disorders may include disorders comprising reduced iron levels (e.g. anemias) or disorders comprising elevated iron levels (e.g. hemochromatosis). BMP-6 and hemojuvelin interact to modulate hepcidin expression. Some methods, compounds and/or compositions of disclosed herein may be used to alter hepcidin levels, thereby regulating bodily iron levels.

[0365] Some embodiments of the present invention may comprise hepcidin agonists or hepcidin antagonists. Hepcidin agonists may activate or promote the expression and/or physiological action of hepcidin. Such agonists may be useful in the treatment or prevention of iron overload due to low hepcidin levels and/or activity. In some cases, agonists may not reverse established iron overload, but may diminish iron damage to tissues. Some hepcidin agonists of the present invention may elevate production of hepcidin through activating and/or enhancing BMP-6/hemojuvelin signaling.

[0366] Hepcidin antagonists may block or reduce the expression and/or physiological action of hepcidin. Such antagonists may be useful in the case of iron deficiency due to high hepcidin levels. In some embodiments, hepcidin antagonists of the present invention may comprise antibodies that disrupt BMP-6 signaling through hemojuvelin.

[0367] Anemias are conditions and/or diseases associated with decreased numbers of red blood cells and/or hemoglobin. Compounds and/or compositions of the present invention may be useful in treating anemias. Such anemias may include anemia of chronic disease (ACD), which is also referred to as anemia of inflammation (AI). Subjects with ACD, may suffer from chronic renal failure or acute inflammation due to rheumatoid arthritis, cancer, infection, etc. Subjects suffering from ACD typically comprise elevated levels of hepcidin and impaired erythropoiesis. In a study by Sasu et al (Sasu et al., 2010. Blood. 115(17):3616-24), an antibody with high affinity for hepcidin was effective in treating murine anemia in a mouse model of inflammation. The studies found that the most effective treatments involved combining the antibody with an erythropoiesis-stimulating agent (ESA). Accordingly, some compounds and/or compositions of the present invention may be used in combination with ESAs to increase efficacy. Current anti-hepcidin antibodies being tested for treatment of ACD include Ab12B9 (Amgen, Thousand Oaks, Calif.) and LY2787106 (Eli Lilly, Indianapolis, Ind.). FG4592 (FibroGen, San Francisco, Calif.) is a small molecule inhibitor of hypoxia-inducible factor (HIF) that is also currently used to treat anemia.

[0368] In some cases, compounds and/or compositions of the present invention may be used to treat subjects with iron deficiency anemia (IDA) associated with gastric bypass surgery and/or inflammatory bowel disease (IBD). Gastric bypass surgery leaves subjects with a reduced ability to metabolize iron due to bypass of the proximal gastric pouch and duodenum (Warsh et al., 2013, the contents of which are herein incorporated by reference in their entirety). IBD patients often suffer from iron deficiency due to intestinal blood loss and decreased absorption due to inflammation.

[0369] Some compounds and/or compositions of the present invention may be used to treat subjects suffering from iron-refractory iron deficiency anemia (IRIDA). IRIDA is a genetic disease caused by a defect in the enzyme Matriptase-2 (De Falco, L. et al., 2013, the contents of which are herein incorporated by reference in their entirety). Matriptase-2, a transmembrane serine protease, is an important hepcidin regulator. Matriptase-2 is capable of enzymatic cleavage of hemojuvelin. Subjects with defective Matriptase-2 activity have elevated levels of hemojuvelin, due to lack of degradation, and therefore hepcidin expression remains high and iron levels are reduced. Characteristics of the disease include, but are not limited to microcytic hypochromic anemia, low saturation of transferrin and normal to high levels of hepcidin. Some subjects with IRIDA are diagnosed soon after birth, but many are not diagnosed until adulthood. Treatments described herein may be used to modulate irregular hepcidin levels associated with IRIDA.

[0370] Iron overloading anemias can occur as a result of blood transfusion. Excess iron associated with transfused blood cannot be secreted naturally and requires additional treatments for removal, such as chelation therapy. Such therapy is generally not well tolerated and may comprise many side effects. Thus, there is a clinical need for new, better tolerated therapies. Additional therapies include EXJADE®, for the treatment of patients, age 10 and older, with non-transfusion-dependent thalassemia (NTDT) syndromes. Also included is ACE-536, a ligand trap that blocks TGF-β superfamily members. Both EXJADE and ACE-536 are known to elevate erythropoiesis. In some embodiments, compounds and/or compositions of the present invention may be used to control iron overloading. Some such embodiments may function to redistribute iron from parenchyma to macrophages where iron is better tolerated. In some cases this may be carried out through elevation of hepcidin levels. In studies by Gardenghi et al (Gardenghi et al., 2010, JCI. 120(12):4466-77), overexpression of murine hepcidin was able to increase hemoglobin levels and decrease iron overload in mouse model of β-thalassemia and a mouse model of hemochromatosis (Viatte et al., 2006, Blood. 107:2952).

[0371] GDF-15 levels in circulation have been found to negatively correlate with hepcidin levels, suggesting a role for GDF-15 in iron loading and/or metabolism (Finkenstedt et al., 2008. British Journal of Haematology. 144:789-93, the contents of which are herein incorporated by reference in their entirety). Transcription of the gene encoding GDF-15 may be upregulated under stress and/or hypoxic conditions. In some cases, compounds and/or compositions of the present invention may be used to treat subjects suffering from iron disorders and/or anemias by altering GDF-15 signaling activity. Such compounds and/or compositions may comprise antibodies capable of stabilizing or destabilizing the GDF-15 GPC or through modulation of one or more interaction between GDF-15 and one or more co-factor.

[0372] Hemochromatosis is a disease characterized by iron overload due to hyperabsorption of dietary iron. In hereditary hemochromatosis (HH), this overload is caused by inheritance of a common autosomal recessive copy of the HFE gene from both parents. In such cases, iron may be overloaded in plasma as well as in organs and tissues, including, but not limited to the pancreas, liver and skin, leading to damage caused by iron deposits (Tussing-Humphreys et al, 2013). Current therapies for HH may include phlebotomy, multiple times per year. In some embodiments, compounds and/or compositions of the present invention may be used to treat HH by modulating subject iron levels.

[0373] Mutations in the hepcidin (HAMP) and/or hemojuvelin (HFE2) genes are responsible for a severe form of hemochromatosis known as juvenile hemochromatosis (Roetto et al., 2003; Papanikolauou et al., 2004). Some mutations of hemojuvelin associated with juvenile hemochromatosis lead to protein misfolding and reduce hemojuvelin secretion from the cell, thus decreasing overall hemojuvelin signaling activity. Other mutations affect hemojuvelin interactions with other signaling molecules. Hemojuvelin comprising the mutation G99R, for example, is unable to bind BMP-2. Hemojuvelin comprising the mutation L101P is unable to associate with either BMP-2 or neogenin. Some therapeutic embodiments of the present invention may comprise the modulation of hemojuvelin signaling.

[0374] During chemotherapy, cell division is temporarily halted to prevent the growth and spread of cancerous cells. An unfortunate side effect is the loss of red blood cells which depend on active cell division of bone marrow cells. In some embodiments, compounds and/or compositions of the present invention may be used to treat anemia associated chemotherapy.

[0375] In some cases, compounds and/or compositions of the present invention may be combined with any of the therapeutics described herein to increase efficacy.

### Therapeutics for Anemia, Thrombocytopenia and Neutropenia

[0376] During chemotherapy, cell division is temporarily halted to prevent the growth and spread of cancerous cells. An unfortunate side effect is the loss of red blood cells, platelets and white blood cells which depend on active cell division of bone marrow cells. In some embodiments, compounds and/or compositions of the present invention may be designed to treat patients suffering from anemia (the loss of red blood cells), thrombocytopenia (a decrease in the number of platelets) and/or neutropenia (a decrease in the number of neutrophils).

### Therapeutics for Cancer

[0377] Various cancers may be treated with compounds and/or compositions of the present invention. As used herein, the term “cancer” refers to any of various malignant neoplasms characterized by the proliferation of anaplastic cells that tend to invade surrounding tissue and metastasize to new body sites and also refers to the pathological condition characterized by such malignant neoplastic growths. Cancers may be tumors or hematological malignancies, and include but are not limited to, all types of lymphomas/leukemias, carcinomas and sarcomas, such as those cancers or tumors found in the anus, bladder, bile duct, bone, brain, breast, cervix, colon/rectum, endometrium, esophagus, eye, gallbladder, head and neck, liver, kidney, larynx, lung, mediastinum (chest), mouth, ovaries, pancreas, penis, prostate, skin, small intestine, stomach, spinal marrow, tailbone, testicles, thyroid and uterus.

[0378] In cancer, TGF-β may be either growth promoting or growth inhibitory. As an example, in pancreatic cancers, SMAD4 wild type tumors may experience inhibited growth in response to TGF-β, but as the disease progresses, constitutively activated type II receptor is typically present. Additionally, there are SMAD4-null pancreatic cancers. In some embodiments, compounds and/or compositions of the present invention are designed to selectively target components of TGF-β signaling pathways that function uniquely in one or more forms of cancer. Leukemias, or cancers of the blood or bone marrow that are characterized by an abnormal proliferation of white blood cells i.e., leukocytes, can be divided into four major classifications including Acute lymphoblastic leukemia (ALL), Chronic lymphocytic leukemia (CLL), Acute myelogenous leukemia or acute myeloid leukemia (AML) (AML with translocations between chromosome 10 and 11 [t(10, 11)], chromosome 8 and 21 [t(8;21)], chromosome 15 and 17 [t(15;17)], and inversions in chromosome 16 [inv(16)]; AML with multilineage dysplasia, which includes patients who have had a prior myelodysplastic syndrome (MDS) or myeloproliferative disease that transforms into AML; AML and myelodysplastic syndrome (MDS), therapy-related, which category includes patients who have had prior chemotherapy and/or radiation and subsequently develop AML or MDS; d) AML not otherwise categorized, which includes subtypes of AML that do not fall into the above categories; and e) Acute leukemias of ambiguous lineage, which occur when the leukemic cells cannot be classified as either myeloid or lymphoid cells, or where both types of cells are present); and Chronic myelogenous leukemia (CML).

[0379] The types of carcinomas include, but are not limited to, papilloma/carcinoma, choriocarcinoma, endodermal sinus tumor, teratoma, adenoma/adenocarcinoma, melanoma, fibroma, lipoma, leiomyoma, rhabdomyoma, mesothelioma, angioma, osteoma, chondroma, glioma, lymphoma/leukemia, squamous cell carcinoma, small cell carcinoma, large cell undifferentiated carcinomas, basal cell carcinoma and sinonasal undifferentiated carcinoma.

[0380] The types of sarcomas include, but are not limited to, soft tissue sarcoma such as alveolar soft part sarcoma, angiosarcoma, dermatofibrosarcoma, desmoid tumor, desmoplastic small round cell tumor, extraskeletal chondrosarcoma, extraskeletal osteosarcoma, fibrosarcoma, hemangiopericytoma, hemangiosarcoma, Kaposi's sarcoma, leiomyosarcoma, liposarcoma, lymphangiosarcoma, lymphosarcoma, malignant fibrous histiocytoma, neurofibrosarcoma, rhabdomyosarcoma, synovial sarcoma, and Askin's tumor, Ewing's sarcoma (primitive neuroectodermal tumor), malignant hemangioendothelioma, malignant schwannoma, osteosarcoma, and chondrosarcoma.

[0381] In some embodiments, compositions and methods of the invention may be used to treat one or more types of cancer or cancer-related conditions that may include, but are not limited to colon cancer, renal cancer, breast cancer, malignant melanoma and glioblastomas (Schlingensiepen et al., 2008; Ouhtit et al., 2013).

[0382] High-grade gliomas (e.g. anaplastic astrocytomas and glioblastomas) make up around 60% of malignant brain tumors. TGF-β2 has been found to be overexpressed in over 90% of such gliomas and expression levels correlate with tumor progression. Further, studies using TGF-β2 reduction at the mRNA level in cancer patients showed significant improvement in tumor outcome (Bogdahn et al., 2010). In light of these studies, some compositions of the present invention may be used therapeutically to treat individuals with high-grade gliomas. Such compositions may act to lower the levels of free TGF-β2 and/or the levels of TGF-β2 activity.

[0383] In some cases, TGF-β2 activity may contribute to tumor development through modulation of metastasis, angiogenesis, proliferation and/or immunosuppressive functions that impair immunological tumor surveillance (Schlingensiepen et al., 2008). A study by Reed et al (Reed et al., 1994) demonstrated TGF-β2 mRNA expression in a large percentage of melanocytic lesions including primary invasive melanomas and metastatic melanomas. Some compounds and/or compositions of the present invention may be used to modulate TGF-β2 activity and/or levels in such lesions and or prevent lesion formation. Melanoma cell growth in the brain parenchyma has also been shown to be influenced by TGF-β2 activity (Zhang et al., 2009). Some compounds and/or compositions of the present invention may be used to prevent or control such cell growth through modulation of TGF-β2 activity and/or levels.

[0384] Among females worldwide, breast cancer is the most prevalent form of cancer. Breast cancer metastasis is mediated in part through interactions between cancer cells and extracellular matrix components, such as hyaluronic acid (HA). CD44 has been shown to be the major receptor for HA on cancer cells (Ouhtit et al., 2013). The interaction between CD44 and HA leads to modulation of cell motility, survival adhesion and proliferation. TGF-β2 transcription is also upregulated by CD44 signaling activity and is believe to contribute to resulting changes in cell motility. Unfortunately, current therapies have limited efficacy and many carry adverse effects due to a lack of specificity. In some cases, compounds and/or compositions of the present invention may be used to alter cellular activities induced by TGF-β2 upregulation.

[0385] The invention further relates to the use of compounds and/or compositions of the present invention for treating one or more forms of cancer, in combination with other pharmaceuticals and/or other therapeutic methods, e.g., with known pharmaceuticals and/or known therapeutic methods, such as, for example, those which are currently employed for treating these disorders. For example, the compounds and/or compositions of the present invention can also be administered in conjunction with one or more additional anti-cancer treatments, such as biological, chemotherapy and radiotherapy. Accordingly, a treatment can include, for example, imatinib (Gleevac), all-trans-retinoic acid, a monoclonal antibody treatment (gemtuzumab, ozogamicin), chemotherapy (for example, chlorambucil, prednisone, prednisolone, vincristine, cytarabine, clofarabine, farnesyl transferase inhibitors, decitabine, inhibitors of MDR1), rituximab, interferon-α, anthracycline drugs (such as daunorubicin or idarubicin), L-asparaginase, doxorubicin, cyclophosphamide, doxorubicin, bleomycin, fludarabine, etoposide, pentostatin, or cladribine), bone marrow transplant, stem cell transplant, radiation therapy, anti-metabolite drugs (methotrexate and 6-mercaptopurine), or any combination thereof.

[0386] Radiation therapy (also called radiotherapy, X-ray therapy, or irradiation) is the use of ionizing radiation to kill cancer cells and shrink tumors. Radiation therapy can be administered externally via external beam radiotherapy (EBRT) or internally via brachytherapy. The effects of radiation therapy are localized and confined to the region being treated. Radiation therapy may be used to treat almost every type of solid tumor, including cancers of the brain, breast, cervix, larynx, lung, pancreas, prostate, skin, stomach, uterus, or soft tissue sarcomas. Radiation is also used to treat leukemia and lymphoma.

[0387] Chemotherapy is the treatment of cancer with drugs that can destroy cancer cells. In current usage, the term “chemotherapy” usually refers to cytotoxic drugs which affect rapidly dividing cells in general, in contrast with targeted therapy. Chemotherapy drugs interfere with cell division in various possible ways, e.g. with the duplication of DNA or the separation of newly formed chromosomes. Most forms of chemotherapy target all rapidly dividing cells and are not specific to cancer cells, although some degree of specificity may come from the inability of many cancer cells to repair DNA damage, while normal cells generally can.

[0388] Most chemotherapy regimens are given in combination. Exemplary chemotherapeutic agents include, but are not limited to, 5-FU Enhancer, 9-AC, AG2037, AG3340, Aggrecanase Inhibitor, Aminoglutethimide, Amsacrine (m-AMSA), Asparaginase, Azacitidine, Batimastat (BB94), BAY 12-9566, BCH-4556, Bis-Naphtalimide, Busulfan, Capecitabine, Carboplatin, Carmustaine+Polifepr Osan, cdk4/cdk2 inhibitors, Chlorombucil, CI-994, Cisplatin, Cladribine, CS-682, Cytarabine HCl, D2163, Dactinomycin, Daunorubicin HCl, DepoCyt, Dexifosamide, Docetaxel, Dolastain, Doxifluridine, Doxorubicin, DX8951f, E 7070, EGFR, Epirubicin, Erythropoietin, Estramustine phosphate sodium, Etoposide (VP16-213), Farnesyl Transferase Inhibitor, FK 317, Flavopiridol, Floxuridine, Fludarabine, Fluorouracil (5-FU), Flutamide, Fragyline, Gemcitabine, Hexamethylmelamine (HMM), Hydroxyurea (hydroxycarbamide), Ifosfamide, Interferon Alfa-2a, Interferon Alfa-2b, Interleukin-2, Irinotecan, ISI 641, Krestin, Lemonal DP 2202, Leuprolide acetate (LHRH-releasing factor analogue), Levamisole, LiGLA (lithium-gamma linolenate), Lodine Seeds, Lometexol, Lomustine (CCNU), Marimistat, Mechlorethamine HCl (nitrogen mustard), Megestrol acetate, Meglamine GLA, Mercaptopurine, Mesna, Mitoguazone (methyl-GAG; methyl glyoxal bis-guanylhydrazone; MGBG), Mitotane (o.p′-DDD), Mitoxantrone, Mitoxantrone HCl, MMI 270, MMP, MTA/LY 231514, Octreotide, ODN 698, OK-432, Oral Platinum, Oral Taxoid, Paclitaxel (TAXOL®), PARP Inhibitors, PD 183805, Pentostatin (2′ deoxycoformycin), PKC 412, Plicamycin, Procarbazine HCl, PSC 833, Ralitrexed, RAS Farnesyl Transferase Inhibitor, RAS Oncogene Inhibitor, Semustine (methyl-CCNU), Streptozocin, Suramin, Tamoxifen citrate, Taxane Analog, Temozolomide, Teniposide (VM-26), Thioguanine, Thiotepa, Topotecan, Tyrosine Kinase, UFT (Tegafur/Uracil), Valrubicin, Vinblastine sulfate, Vindesine sulfate, VX-710, VX-853, YM 116, ZD 0101, ZD 0473/Anormed, ZD 1839, ZD 9331.

[0389] Biological therapies use the body's immune system, either directly or indirectly, to fight cancer or to lessen the side effects that may be caused by some cancer treatments. In some embodiments, compounds and/or compositions of the present invention may be considered biological therapies in that they may stimulate immune system action against one or more tumor, for example. However, this approach may also be considered with other such biological approaches, e.g., immune response modifying therapies such as the administration of interferons, interleukins, colony-stimulating factors, other monoclonal antibodies, vaccines, gene therapy, and nonspecific immunomodulating agents are also envisioned as anti-cancer therapies to be combined with the compounds and/or compositions of the present invention.

[0390] Small molecule targeted therapy drugs are generally inhibitors of enzymatic domains on mutated, overexpressed, or otherwise critical proteins within the cancer cell, such as tyrosine kinase inhibitors imatinib (Gleevec/Glivec) and gefitinib (Iressa). Examples of monoclonal antibody therapies that can be used with compounds and/or compositions of the present invention include, but are not limited to, the anti-HER2/neu antibody trastuzumab (Herceptin) used in breast cancer, and the anti-CD20 antibody rituximab, used in a variety of B-cell malignancies. The growth of some cancers can be inhibited by providing or blocking certain hormones. Common examples of hormone-sensitive tumors include certain types of breast and prostate cancers. Removing or blocking estrogen or testosterone is often an important additional treatment. In certain cancers, administration of hormone agonists, such as progestogens may be therapeutically beneficial.

[0391] Cancer immunotherapy refers to a diverse set of therapeutic strategies designed to induce the patient's own immune system to fight the tumor, and include, but are not limited to, intravesical BCG immunotherapy for superficial bladder cancer, vaccines to generate specific immune responses, such as for malignant melanoma and renal cell carcinoma, and the use of Sipuleucel-T for prostate cancer, in which dendritic cells from the patient are loaded with prostatic acid phosphatase peptides to induce a specific immune response against prostate-derived cells.

[0392] In some embodiments, compounds and/or compositions of the present invention are designed to prevent T cell inhibition. Such compounds and/or compositions may prevent the dissociation of growth factors from the prodomain of the GPC or from extracellular matrix and/or cellular matrix components including, but not limited to GARPs, fibrillins or LTBPs.

### Therapeutics for Bone Healing

[0393] Compounds and/or compositions of the present invention may be used to treat bone disorders and/or improve bone healing or repair. Cellular remodeling of bone is a lifelong process that helps to maintain skeletal integrity. This process involves cycles of osteoclastic bone resorption and new bone formation that function to repair defects and areas of weakness in bone. TGF-beta family members, preferably BMPs, are thought to be important factors in coupling the processes of resorption and formation by osteoclasts. TGF-beta family members are prevalent in the bone matrix and upregulated by bone injury. TGF-beta family members are also believed to impart strength to the fully formed bone matrix, imparting resistance to fracture. The role of TGF-beta family members in bone remodeling makes them attractive targets for potential therapeutics to treat bone disorder and disease.

[0394] Numerous diseases and/or disorders affect bones and joints. Such diseases and/or disorders may be congenital, genetic and/or acquired. Such diseases and/or disorders include, but are not limited to, bone cysts, infectious arthritis, Paget's disease of the bone, Osgood-Schlatter disease, Kohler's bone disease, bone spurs (osteophytes), bone tumors, craniosynostosis, fibrodysplasia ossificans progressive, fibrous dysplasia, giant cell tumor of bone, hypophosphatasia, Klippel-Feil syndrome, metabolic bone disease, osteoarthritis, osteitis deformans, osteitis fibrosa cystica, osteitis pubis, condensing osteitis, osteitis condensans osteochondritis dissecans, osteochondroma, osteogenesis imperfecta, osteomalacia, osteomyelitis, osteopenia, osteopetrosis, osteoporosis, osteosarcoma, porotic hyperostosis, primary hyperparathyroidism, renal osteodystrophy and water on the knee.

[0395] Mouse models for evaluating the effectiveness of therapeutics on bone development and repair are well known in the art. In one such model demonstrated by Mohammad, et al. (Mohammad, K. S. et al., Pharmacologic inhibition of the TGF-beta type I receptor kinase has anabolic and anti-catabolic effects on bone. PLoS One. 2009; 4(4):e5275. Epub 2008 Apr. 16), inhibition of the TGF-beta type I receptor was carried out in C57B1/6 mice through twice daily administration of a potent inhibitor, SD-208, by gavage. Subsequently, bone mineral density (BMD) was analyzed using a PIXImus mouse densitometer (GE Lunar II, Faxitron Corp., Wheeling, Ill.). Changes in BMD are expressed as a percentage change in the area scanned. The study found that after 6 weeks of treatment, male mice exhibited a 4.12% increase in bone accrual while female mice exhibited a 5.2% increase.

[0396] Compounds and/or compositions of the present invention may be useful as therapies for simple or complex bone fractures and/or bone repair. In such treatments, compounds and/or compositions of the present invention may be introduced to the site of injury directly or through the incorporation into implantation devices and coated biomatrices. Additionally, treatments are contemplated in which compounds and/or compositions of the present invention are supplied together with one or more GPC in a treatment area, facilitating the slow release of one or more growth factors from such GPCs.

### Therapeutics for Tooth Regeneration

[0397] Arany et al demonstrate that low-power laser can activate latent TGF-β when focused on the tooth pulp of rats, leading to the formation of tertiary dentin (Arany, P. R. et al., 2014. Sci Transl Med 6, 238ra69, the contents of which are herein incorporated by reference in their entirety). The compounds and/or compositions of the present invention may similarly be used to treat tooth loss and/or degeneration. Such compounds and/or compositions may promote dental regeneration in subjects receiving such compounds and/or compositions. Compounds and/or compositions of the invention may be TGF-β-activators that elevate TGF-β activity in the region where tertiary dentin formation is desired. Such compounds may include TGF-modulator antibodies that promote dissociation of TGF-β growth factors from latent complexes. In some cases, such methods may include the use of anti-TGF-β-LAP antibodies as TGF-β-activating antibodies. In some embodiments, these methods may include the use of commercially available anti-TGF-β LAP antibodies, including, but not limited to MAB246 or MAB2463 (R&D Systems, Minneapolis, Minn.).

### Therapeutics for Angiogenic and Endothelial Proliferation Conditions

[0398] The compounds and/or compositions of the present invention may be used to treat angiogenic and endothelial proliferation syndromes, diseases or disorders. The term “angiogenesis”, as used herein refers to the formation and/or reorganization of new blood vessels. Angiogenic disease involves the loss of control over angiogenesis in the body. In such cases, blood vessel growth, formation or reorganization may be overactive (including during tumor growth and cancer where uncontrolled cell growth requires increased blood supply) or insufficient to sustain healthy tissues. Such conditions may include, but are not limited to angiomas, angiosarcomas, telangiectasia, lymphangioma, congenital vascular anomalies, tumor angiogenesis and vascular structures after surgery. Excessive angiogenesis is noted in cancer, macular degeneration, diabetic blindness, rheumatoid arthritis, psoriasis as well as many other conditions. Excessive angiogenesis is often promoted by excessive angiogenic growth factor expression. Compounds and/or compositions of the present invention may act to block growth factors involved in excessive angiogenesis. Alternatively, compounds and/or compositions of the present invention may be utilized to promote growth factor signaling to enhance angiogenesis in conditions where angiogenesis is inhibited. Such conditions include, but are not limited to coronary artery disease, stroke, diabetes and chronic wounds.

### Therapeutics for Orphan Indications and Diseases

[0399] The compounds and/or compositions of the present invention may be used to treat orphan indications and/or diseases. Such diseases include Marfan's syndrome. This syndrome is a connective tissue disorder, effecting bodily growth and development. Tissues and organs that are most severely compromised include the heart, blood vessels, bones, eyes, lungs and connective tissue surrounding the spinal cord. Unfortunately, the effects can be life threatening. Marfan's syndrome is caused by a genetic mutation in the gene that produces fibrillin, a major component of bodily connective tissue. Latent TGF-β binding protein (LTBP) is an important regulator of TGF-β signaling that exhibits close identity to fibrillin protein family members. Functional LTBP is required for controlling the release of active TGF-β (Oklu, R. et al., The latent transforming growth factor beta binding protein (LTBP) family. Biochem J. 2000 Dec. 15; 352 Pt 3:601-10). In some embodiments, compounds and/or compositions of the present invention are designed to alter the release profile of TGF-β. In such embodiments, compounds and/or compositions may comprise antibodies characterized as inhibitory antibodies.

[0400] In some embodiments, compounds and/or compositions of the present invention may be useful in the treatment of Camurati-Engelmann disease (CED). This disease primarily affects the bones, resulting in increased bone density. Especially affected are the long bones of the legs and arms; however, the bones of the skill and hips can also be affected. The disease results in leg and arm pain as well as a variety of other symptoms. CED is very rare, reported in approximately 200 individuals worldwide and is caused by a mutation in the TGF-β gene. TGF-β produced in the bodies of these individuals has a defective prodomain, leading to overactive TGF-β signaling (Janssens, K. et al., Transforming growth factor-beta 1 mutations in Camurati-Engelmann disease lead to increased signaling by altering either activation or secretion of the mutant protein. J Biol Chem. 2003 Feb. 28; 278(9):7718-24. Epub 2002 Dec. 18). As described by Shi et al., (Shi, M. et al., Latent TGF-beta structure and activation. Nature. 2011 Jun. 15; 474(7351):343-9), among CED mutations, Y81H disrupts an α2-helix residue that cradles the TGF-β fingers. The charge-reversal E169K and H222D mutations disrupt a pH-regulated salt bridge between Glu 169 and His 222 in the dimerization interface of the prodomain. Residue Arg 218 is substantially buried: it forms a cation-π bond with Tyr 171 and salt bridges across the dimer interface with residue Asp 226 of the ‘bowtie’ region of the growth factor prodomain complex (GPC). Moreover, CED mutations in Cys 223 and Cys 225 demonstrate the importance of disulphide bonds in the bowtie region for holding TGF-β in inactive form. In this embodiment, compounds and/or compositions of the present invention comprising one or more inhibitory antibodies would serve to alleviate symptoms. In some embodiments, administration would be to the neonate subject.

### Therapeutics for Immune and Autoimmune Diseases and Disorders

[0401] Compounds and/or compositions of the present invention may be used to treat immune and autoimmune disorders. Such disorders include, but are not limited to Acute Disseminated Encephalomyelitis (ADEM), Acute necrotizing hemorrhagic leukoencephalitis, Addison's disease, Agammaglobulinemia, Alopecia areata, Amyloidosis, Ankylosing spondylitis, Anti-GBM/Anti-TBM nephritis, Antiphospholipid syndrome (APS), Autoimmune angioedema, Autoimmune aplastic anemia, Autoimmune dysautonomia, Autoimmune hepatitis, Autoimmune hyperlipidemia, Autoimmune immunodeficiency, Autoimmune inner ear disease (AIED), Autoimmune myocarditis, Autoimmune pancreatitis, Autoimmune retinopathy, Autoimmune thrombocytopenic purpura (ATP), Autoimmune thyroid disease, Autoimmune urticaria, Axonal & neuronal neuropathies, Balo disease, Behcet's disease, Bullous pemphigoid, Cardiomyopathy, Castleman disease, Celiac disease, Chagas disease, Chronic fatigue syndrome, Chronic inflammatory demyelinating polyneuropathy (CIDP), Chronic recurrent multifocal ostomyelitis (CRMO), Churg-Strauss syndrome, Cicatricial pemphigoid/benign mucosal pemphigoid, Crohn's disease, Cogans syndrome, Cold agglutinin disease, Congenital heart block, Coxsackie myocarditis, CREST disease, Essential mixed cryoglobulinemia, Demyelinating neuropathies, Dermatitis herpetiformis, Dermatomyositis, Devic's disease (neuromyelitis optica), Diabetes Type I, Discoid lupus, Dressler's syndrome, Endometriosis, Eosinophilic esophagitis, Eosinophilic fasciitis, Erythema nodosum, Experimental allergic encephalomyelitis, Evans syndrome, Fibromyalgia, Fibrosing alveolitis, Giant cell arteritis (temporal arteritis), Glomerulonephritis, Goodpasture's syndrome, Granulomatosis with Polyangiitis (GPA) see Wegener's, Graves' disease, Guillain-Barre syndrome, Hashimoto's encephalitis, Hashimoto's thyroiditis, Hemolytic anemia, Henoch-Schonlein purpura, Herpes gestationis, Hypogammaglobulinemia, Idiopathic thrombocytopenic purpura (ITP), IgA nephropathy, IgG4-related sclerosing disease, Immunoregulatory lipoproteins, Inclusion body myositis, Insulin-dependent diabetes (type1), Interstitial cystitis, Juvenile arthritis, Juvenile diabetes, Kawasaki syndrome, Lambert-Eaton syndrome, Large vessel vasculopathy, Leukocytoclastic vasculitis, Lichen planus, Lichen sclerosus, Ligneous conjunctivitis, Linear IgA disease (LAD), Lupus (SLE), Lyme disease, chronic, Meniere's disease, Microscopic polyangiitis, Mixed connective tissue disease (MCTD), Mooren's ulcer, Mucha-Habermann disease, Multiple endocrine neoplasia syndromes, Multiple sclerosis, Myositis, Myasthenia gravis, Narcolepsy, Neuromyelitis optica (Devic's), Neutropenia, Ocular cicatricial pemphigoid, Optic neuritis, Palindromic rheumatism, PANDAS (Pediatric Autoimmune Neuropsychiatric Disorders Associated with Streptococcus), Paraneoplastic cerebellar degeneration, Paroxysmal nocturnal hemoglobinuria (PNH), Parry Romberg syndrome, Parsonnage-Turner syndrome, Pars planitis (peripheral uveitis), Pemphigus, Peripheral neuropathy, Perivenous encephalomyelitis, Pernicious anemia, POEMS syndrome, Polyarteritis nodosa, Type I, II, & III autoimmune polyglandular syndromes, Polyendocrinopathies, Polymyalgia rheumatica, Polymyositis, Postmyocardial infarction syndrome, Postpericardiotomy syndrome, Progesterone dermatitis, Primary biliary cirrhosis, Primary sclerosing cholangitis, Psoriasis, Psoriatic arthritis, Idiopathic Pulmonary fibrosis, Pyoderma gangrenosum, Pure red cell aplasia, Raynauds phenomenon, Reactive arthritis, Reflex sympathetic dystrophy, Reiter's syndrome, Relapsing polychondritis, Restless legs syndrome, Retroperitoneal fibrosis, Rheumatic fever, Rheumatoid arthritis, Sarcoidosis, Schmidt syndrome, Scleritis, Scleroderma, Sjogren's syndrome, Small vessel vasculopathy, Sperm & testicular autoimmunity, Stiff person syndrome, Subacute bacterial endocarditis (SBE), Susac's syndrome, Sympathetic ophthalmia, Takayasu's arteritis, Temporal arteritis/Giant cell arteritis, Thrombocytopenic purpura (TTP), Tolosa-Hunt syndrome, Transverse myelitis, Tubular autoimmune disorder, Ulcerative colitis, Undifferentiated connective tissue disease (UCTD), Uveitis, Vesiculobullous dermatosis, Vasculitis, Vitiligo and Wegener's granulomatosis (also known as Granulomatosis with Polyangiitis (GPA)).

[0402] TGF-β plays an active role in leukocyte differentiation, proliferation and activation making it an important factor in immune and autoimmune diseases. Additionally, TGF-β promotes chemotaxis of leukocytes and influences adhesion molecule-mediated localization. A role for TGF-β in cardiac, pulmonary and gastric inflammation has been demonstrated. Furthermore, SMAD3-deficient mice are prone to chronic mucosal infections as a result of T-cell activation impairment and reduced mucosal immunity (Blobe, G. C. et al., Role of transforming growth factor beta in human disease. N Engl J Med. 2000 May 4; 342(18):1350-8). As an immunosuppressant, TGF-β has been shown to both inhibit the function of inflammatory cells as well as enhance the function of regulatory T cells. Recent studies have shown that the latent TGF-β growth factor prodomain complex (GPC) binds to regulatory T cells through an interaction with the Glycoprotein-A repetitions anonymous protein (GARP). In fact, GARP is necessary for TGF-β association with T cells (Tran, D. Q. et al., GARP (LRRC32) is essential for the surface expression of latent TGF-β on platelets and activated FOXP3⁺ regulatory T cells. PNAS. 2009. 106(32):13445-50). This interaction provides the platform necessary to release active TGF-β from the GPC in an integrin-dependent manner (Wang, R. et al., GARP regulates the bioavailability and activation of TGF-β. Mol Biol Cell. 2012 March; 23(6):1129-39. Epub 2012 Jan. 25). In some embodiments, compounds and/or compositions of the present invention modulate the interaction between GARP and TGF-β. Such modulation may selectively modulate T cell activity for treatment of disease (e.g. autoimmune disease and/or cancer). In some embodiments, compounds and/or compositions of the present invention may be used for the treatment of immune and/or autoimmune disorders. In some embodiments, compounds and/or compositions of the present invention may specifically target GARP-bound GPC, GARP or the interaction site between GARP and the GPC. In some embodiments, compounds and/or compositions of the present invention comprising antibodies are designed to promote release of growth factors (including, but not limited to TGF-β) from GARP-bound GPCs while not affecting growth factor release from LTBP-bound GPCs. Treatment of immune and autoimmune disorders with compounds and/or compositions of the present invention may be in combination with standard of care (SOC) or synergistic combinations or with companion diagnostics.

### Therapeutics for Infectious Agents

[0403] In some embodiments, compounds and/or compositions of the present invention may be useful for treatment of infectious diseases and/or disorders, for example, in subjects with one or more infections. In some embodiments, subjects have one or more infection or are at risk of developing one or more infection. As used herein, the term “infection” refers to a disease or condition in a host attributable to the presence of one or more foreign organism or agent capable of reproduction within the host. Infections typically comprise breaching of one or more normal mucosal or other tissue barriers by one or more infectious organisms or agents. Subjects having one or more infection are subjects that comprise one or more objectively measurable infectious organisms or agents present in their body. Subjects at risk of having one or more infection are subjects that are predisposed to developing one or more infection. Such subjects may include, for example, subjects with known or suspected exposure to one or more infectious organisms or agents. In some embodiments, subjects at risk of having infections may also include subjects with conditions associated with impaired abilities to mount immune responses to infectious organisms and/or agents, e.g., subjects with congenital and/or acquired immunodeficiency, subjects undergoing radiation therapy and/or chemotherapy, subjects with burn injuries, subjects with traumatic injuries and subjects undergoing surgery or other invasive medical or dental procedures.

[0404] Infections are broadly classified as bacterial, viral, fungal, and/or parasitic based on the category of infectious organisms and/or agents involved. Other less common types of infection are also known in the art, including, e.g., infections involving rickettsiae, mycoplasmas, and agents causing scrapie, bovine spongiform encephalopathy (BSE), and prion diseases (e.g., kuru and Creutzfeldt-Jacob disease). Examples of bacteria, viruses, fungi, and parasites which cause infection are well known in the art. An infection can be acute, subacute, chronic, or latent, and it can be localized or systemic. As used herein, the term “chronic infection” refers to those infections that are not cleared by the normal actions of the innate or adaptive immune responses and persist in the subject for a long duration of time, on the order of weeks, months, and years. A chronic infection may reflect latency of the infectious agent, and may include periods in which no infectious symptoms are present, i.e., asymptomatic periods. Examples of chronic infections include, but are not limited to, HIV infection and herpesvirus infections. Furthermore, an infection can be predominantly intracellular or extracellular during at least one phase of the infectious organism's or agent's life cycle in the host.

[0405] Compounds and/or compositions of the present invention and additional therapeutic agents may be administered in combination in the same composition (e.g., parenterally), as part of a separate composition or by another method described herein.

Therapeutics for Eye Related Diseases, Disorders and/or Conditions

[0406] In some embodiments, compounds and/or compositions of the present invention may be useful in the treatment of diseases, disorders and/or conditions related to eyes. These may include, but are not limited to glaucoma, dry eye and/or corneal wound healing. In some embodiments, compounds and/or compositions may be useful in the treatment of glaucoma. Evidence suggests that TGF-β2 is upregulated in glaucoma (Picht, G. et al., Transforming growth factor beta 2 levels in the aqueous humor in different types of glaucoma and the relation to filtering bleb development. Graefes Arch Clin Exp Ophthalmol. 2001 March 239(3):199-207; Tripathi, R. C. et al., Aqueous humor in glaucomatous eyes contains an increased level of TGF-β2. Exp Eye Res. 1994 December 59(6):723-7). This includes primary open-angle glaucoma and juvenile glaucoma. There is also evidence that TGF-β2 may induce senescence-like effects in human trabecular meshwork cells, which control intraocular pressure (often dysfunctional in glaucoma) (Yu, A. L. et al., TGF-β2 induces senescence-associated changes in human trabecular meshwork cells. Invest Ophthalmol Vis Sci. 2010 November 51(11): 5718-23). In some embodiments, compounds and/or compositions of the present invention may be used to decrease the ratio of free TGF-β2 to GPC-bound (inactive) TGF-β2 in or around eye tissues affected by or related to glaucoma. TGF-β-related proteins may also impact on corneal wound healing (e.g. after surgical repair and/or LASIK treatment) (Huh, M. I. et al., Distribution of TGF-β isoforms and signaling intermediates in corneal fibrotic wound repair. J Cell Biochem. 2009 Oct. 1. 108(2): 476-88; Sumioka, T. et al., Inhibitory effect of blocking TGF-beta/Smad signal on injury-induced fibrosis of corneal endothelium. Mol Vis. 2008; 14:2272-81. Epub 2008 Dec. 11; Carrington, L. M. et al., Differential regulation of key stages in early corneal wound healing by TGF-beta isoforms and their inhibitors. Invest Ophthalmol Vis Sci. 2006 May; 47(5):1886-94). Compounds and/or compositions of the present invention may be used to modulate TGF-β-related proteins in the cornea to enable and/or enhance wound healing. Such compounds and/or compositions would be welcomed in the field where previous attempts have been unsuccessful. Mead et al (Mead, A. L. et al., Evaluation of anti-TGF-beta2 antibody as a new postoperative anti-scarring agent in glaucoma surgery. Invest Ophthalmol Vis Sci. 2003 August; 44(8):3394-401) developed anti-TGF-β2 antibodies to prevent scarring in eye tissues; however, results of clinical trials were inconclusive. In some embodiments, compounds and/or compositions of the present invention may be used to modulate TGF-β2 levels (free versus GPC-bound) thereby providing an alternate method of approaching anti-scarring therapy.

### Therapeutics for Cardiovascular Indications

[0407] In some embodiments, compounds and/or compositions of the present invention may be used to treat one or more cardiovascular indications, including, but not limited to cardiac hypertrophy. Cardiac hypertrophy comprises enlargement of the heart due, typically due to increased cell volume of cardiac cells (Aurigemma 2006. N Engl J Med. 355(3):308-10). Age-related cardiac hypertrophy may be due, in part, to reduced circulating levels of GDF-11. A study by Loffredo et al (Loffredo et al., 2013. Cell. 153:828-39) found that fusion of the circulatory system between young and old mice had a protective effect with regard to cardiac hypertrophy. The study identified GDF-11 as a circulating factor that decreased with age in mice and was able to show that its administration could also reduce cardiac hypertrophy. Some compounds and/or compositions of the present invention may be used to treat and/or prevent cardiac atrophy. Such compounds and/or compositions may comprise GDF-11 agonists that elevate levels of circulating GDF-11, in some cases through enhancing the dissociation of GDF-11 growth factor from latent GPCs.

[0408] In some embodiments, compositions and methods of the invention may be used to treat one or more types of arterial disorders. Such disorders may include, but are not limited to the development of aortic aneurysms. Aortic aneurysms may arise from a variety of causes, but most result ultimately in the overexpression of TGF-β2. A study by Boileau et al (Boileau et al., Nature Genetics Letters. 2012. 44(8):916-23, the contents of which are herein incorporated by reference in their entirety) uncovered causative mutations in TGF-β2 that were associated with some inherited forms of susceptibility to thoracic aortic disease. Interestingly, although the mutations were predicted to cause haploinsufficiency for TGF-β2, the aortic tissues of individuals with such mutations comprised increased levels of TGF-β2, as determined by immunostaining. Similar findings were found in aortic tissues from individuals suffering from Marfans syndrome (Nataatmadja et al., 2006). In some cases, compounds and/or compositions of the present invention may be used to reduce or prevent elevated TGF-β2 signaling in such instances thereby limiting aneurysm development and/or progression.

[0409] In some embodiments, animal models may be used to develop and test compounds and/or compositions of the present invention for use in the treatment of cardiovascular diseases, disorders and/or conditions. In some cases, vascular injury models may be used. Such models may include balloon injury models. In some cases, these may be carried out as described in Smith et al., 1999. Circ Res. 84(10):1212-22, the contents of which are herein incorporated by reference in their entirety.

Therapeutics Related to Muscle Disorders and/or Injuries

[0410] In some embodiments, compounds and/or compositions of the present invention may be used to treat one or more muscle disorders and/or injuries. In some cases, such compounds and/or composition may include, but are not limited to antibodies that modulate GDF-8, GDF-11 and/or activin activity. Muscle comprises about 40-50% of total body weight, making it the largest organ in the body. Muscle disorders may include cachexia (e.g. muscle wasting). Muscle wasting may be associated with a variety of diseases and catabolic disorders (e.g. HIV/AIDS, cancer, cancer cachexia, renal failure, congestive heart failure, muscular dystrophy, disuse atrophy, chronic obstructive pulmonary disease, motor neuron disease, trauma, neurodegenerative disease, infection, rheumatoid arthritis, immobilization, diabetes, etc.). In such disorders, GDF-8 and/or activin signaling activity may contribute to muscle catabolism (Han et al., 2013. Int J Biochem Cell Biol. 45(10):2333-47; Lee., 2010. Immunol Endocr Metab Agents Med Chem. 10:183-94, the contents of each of which are herein incorporated by reference in their entirety). Other muscle disorders may comprise sarcopenia. Sarcopenia is the progressive loss of muscle and function associated with aging. In the elderly, sarcopenia can cause frailty, weakness, fatigue and loss of mobility (Morely. 2012. Family Practice. 29:i44-i48). With the aged population increasing in numbers, sarcopenia is progressively becoming a more serious public health concern. A study by Hamrick et al (Hamrick et al., 2010. 69(3):579-83) demonstrated that GDF-8 inhibition could repair muscle in a mouse model of fibula osteotomoy comprising lateral compartment muscle damage. Administration of GDF-8 propeptides was sufficient to increase muscle mass by nearly 20% as well as improve fracture healing. Some compounds and/or compositions of the present invention may be used to treat muscle diseases, disorders and/or injuries by modulating GDF-8 activity. In some cases, compounds of the present invention may be GDF-8 signaling antagonists, preventing or reducing GDF-8 signaling activity.

[0411] Inclusion body myositis (IBM) is a disease characterized by progressive muscle loss, typically occurring in mid- to late-life. The disease is thought to occur due to an autoimmune response to autoantigens in the muscle causing T-cell invasion of the muscle fiber and resulting in myofiber destruction (Greenberg 2012. Curr Opin Neurol. 25(5):630-9). Therapeutic compounds are being investigated, including Bimagrumab (BYM338; Novartis, Basel, Switzerland), an antibody that targets type II activin receptors, preventing GDF-8 and/or activin signal transduction, thereby stimulating muscle production and strengthening [see clinical trial number NCT01925209 entitled Efficacy and Safety of Bimagrumab/BYM338 at 52 Weeks on Physical Function, Muscle Strength, Mobility in sIBM Patients (RESILIENT)]. Some compounds and/or compositions of the present invention may be used to treat subjects with IBM. In some cases, such compounds and/or compositions may block GDF-8 activity (e.g. through stabilization of GDF-8 GPCs). In addition to IBM, BYM338 is being investigated for treatment of chronic obstructive pulmonary disease (COPD). In some cases, compounds and/or compositions of the present invention utilized for IBM treatment, may be used to treat COPD as well. In some cases, compounds and/or compositions of the present invention may be administered in combination and/or coordination with BYM338.

### Therapeutics for Diabetes

[0412] Skeletal muscle uses and stores glucose for fuel. Due to this, skeletal muscle is an important regulator of circulating glucose levels. Uptake of glucose by muscle can be stimulated by either contraction or by insulin stimulation (McPherron et al., 2013. Adipocyte. 2(2):92-8, herein incorporated by reference in its entirety). A recent study by Guo et al (Guo, et al., 2012. Diabetes 61(10):2414-23) found that when GDF-8 receptor-deficient mice were crossed with A-ZIP/F1 mice (a lipodistrophic mouse strain, used as a diabetic model), hybrid off-spring showed reduced levels of blood glucose and improved sensitivity to insulin. Hyperphagia (excessive eating) was also reduced in these mice. In some embodiments, compound and/or compositions of the present invention may be used to treat diabetes and/or hyperphagia. Some such treatments may be used to reduce blood glucose and/or improve insulin sensitivity. In some cases, such treatments may comprise GDF-8 signaling antagosists, such as one or more antibodies that prevent dissociation of GDF-8 from its prodomain.

Therapeutics for Gastro-Intestinal Diseases, Disorders and/or Conditions

[0413] In some embodiments, compositions and methods of the invention may be used to treat one or more types of gastro-intestinal (GI) disorders. Such disorders may include, but are not limited to inflammatory bowel disease (IBD) (e.g. Crohn's disease and ulcerative colitis).

[0414] TGF-β2 may play a role in gut homeostasis and may have an anti-inflammatory role, protecting against GI-related disorders such as mucositis and certain forms of colitis. In one study, TGF-β2 was shown to suppress macrophage inflammatory responses in the developing intestine and protect against inflammatory mucosal injury (Maheshwari et al., 2011). Interestingly, levels of TGF-β2 are high in breast milk, suggesting that TGF-β2 may function, in some cases, topically. Indeed, TGF-β2 in breast milk may attenuate inflammatory responses (Rautava et al., 2011). Some compounds, compositions and/or methods of the present invention may be used to modulate GI TGF-β2 levels and/or activity in the maintenance of homeostasis and/or in the management of GI-related disorders.

[0415] In some cases, models of GI-related diseases, disorders and/or conditions may be used to develop and/or test compounds and/or compositions of the invention for treatment of GI-related diseases, disorders and/or conditions. In some cases, GI injury models may be used. Such injury models may include, but are not limited to 2,4,6-trinitrobenzenesulfonic acid (TNBS) induced colitis models. Such models may be carried out as described in Scheiffele, F. et al., 2002. Curr Protoc Immunol. Chapter 15: Unit 15.19, the contents of which are herein incorporated by reference in their entirety.

### Veterinary Applications

[0416] In some embodiments, it is contemplated that compositions and methods of the invention will find utility in the area of veterinary care including the care and treatment of non-human vertebrates. As described herein, the term “vertebrate” includes all vertebrates including, but not limited to fish, amphibians, birds, reptiles and mammals (including, but not limited to alpaca, banteng, bison, camel, cat, cattle, deer, dog, donkey, gayal, goat, guinea pig, horse, llama, mice, monkeys, mule, pig, rabbit, rats, reindeer, sheep water buffalo, yak and humans). As used herein the term “non-human vertebrate” refers to any vertebrate with the exception of humans (i.e. Homo sapiens). Exemplary non-human vertebrates include wild and domesticated species such as companion animals and livestock. Livestock include domesticated animals raised in an agricultural setting to produce materials such as food, labor, and derived products such as fiber and chemicals. Generally, livestock includes all mammals, avians and fish having potential agricultural significance. In particular, four-legged slaughter animals include steers, heifers, cows, calves, bulls, cattle, swine and sheep.

### Bioprocessing

[0417] In some embodiments, the present invention provides methods for producing one or more biological products in host cells by contacting such cells with compounds and/or compositions of the present invention capable of modulating expression of target genes, or altering the level of growth factor signaling molecules wherein such modulation or alteration enhances production of biological products. According to the present invention, bioprocessing methods may be improved by using one or more compounds and/or compositions of the present invention. They may also be improved by supplementing, replacing or adding one or more compounds and/or compositions.

### Pharmaceutical Compositions

[0418] The pharmaceutical compositions described herein may be characterized by one or more of bioavailability, therapeutic window and/or volume of distribution.

### Bioavailability

[0419] In some embodiments, pharmaceutical compositions comprise complexes of compounds and/or compositions of the present invention with GPCs. In such embodiments, complexes may be implanted at desired therapeutic sites where steady dissociation of growth factors from complexes may occur over a desired period of time. In some embodiments, implantation complexes may be carried out in association with sponge and/or bone-like matrices. Such implantations may include, but are not limited to dental implant sites and/or sites of bone repair.

[0420] In some embodiments, compounds and/or compositions of the present invention are made in furin-deficient cells. GPCs produced in such cells may be useful for treatment in areas where release is slowed due to the fact that furin cleavage in vivo is rate-limiting during GPC processing. In some embodiments, one or more tolloid and/or furin sites in GPCs are mutated, slowing the action of endogenous tolloid and/or furin proteases. In such embodiments, growth factor release may be slowed (e.g. at sites of implantation).

[0421] Antibodies of the present invention, when formulated into compositions with delivery/formulation agents or vehicles as described herein, may exhibit increased bioavailability as compared to compositions lacking delivery agents as described herein. As used herein, the term “bioavailability” refers to the systemic availability of a given amount of a particular agent administered to a subject. Bioavailability may be assessed by measuring the area under the curve (AUC) or the maximum serum or plasma concentration (Cₘₐₓ) of the unchanged form of a compound following administration of the compound to a mammal. AUC is a determination of the area under the curve plotting the serum or plasma concentration of a compound along the ordinate (Y-axis) against time along the abscissa (X-axis). Generally, the AUC for a particular compound may be calculated using methods known to those of ordinary skill in the art and as described in G. S. Banker, Modern Pharmaceutics, Drugs and the Pharmaceutical Sciences, v. 72, Marcel Dekker, New York, Inc., 1996, the contents of which are herein incorporated by reference in their entirety.

[0422] Cₘₐₓ values are maximum concentrations of compounds achieved in serum or plasma of a subject following administration of compounds to the subject. Cₘₐₓ values of particular compounds may be measured using methods known to those of ordinary skill in the art. As used herein, the phrases “increasing bioavailability” or “improving the pharmacokinetics,” refer to actions that may increase the systemic availability of a compounds and/or compositions of the present invention (as measured by AUC, Cₘₐₓ, or Cₘᵢₙ) in a subject. In some embodiments, such actions may comprise co-administration with one or more delivery agents as described herein. In some embodiments, the bioavailability of compounds and/or compositions may increase by at least about 2%, at least about 5%, at least about 10%, at least about 15%, at least about 20%, at least about 25%, at least about 30%, at least about 35%, at least about 40%, at least about 45%, at least about 50%, at least about 55%, at least about 60%, at least about 65%, at least about 70%, at least about 75%, at least about 80%, at least about 85%, at least about 90%, at least about 95% or about 100%.

### Therapeutic Window

[0423] Compounds and/or compositions of the present invention, when formulated with one or more delivery agents as described herein, may exhibit increases in the therapeutic window of compound and/or composition administration as compared to the therapeutic window of compounds and/or compositions administered without one or more delivery agents as described herein. As used herein, the term “therapeutic window” refers to the range of plasma concentrations, or the range of levels of therapeutically active substance at the site of action, with a high probability of eliciting a therapeutic effect. In some embodiments, therapeutic windows of compounds and/or compositions when co-administered with one or more delivery agent as described herein may increase by at least about 2%, at least about 5%, at least about 10%, at least about 15%, at least about 20%, at least about 25%, at least about 30%, at least about 35%, at least about 40%, at least about 45%, at least about 50%, at least about 55%, at least about 60%, at least about 65%, at least about 70%, at least about 75%, at least about 80%, at least about 85%, at least about 90%, at least about 95% or about 100%.

### Volume of Distribution

[0424] Compounds and/or compositions of the present invention, when formulated with one or more delivery agents as described herein, may exhibit an improved volume of distribution (V_{dist}), e.g., reduced or targeted, relative to formulations lacking one or more delivery agents as described herein. V_{dist} relates the amount of an agent in the body to the concentration of the same agent in the blood or plasma. As used herein, the term “volume of distribution” refers to the fluid volume that would be required to contain the total amount of an agent in the body at the same concentration as in the blood or plasma: V_{dist} equals the amount of an agent in the body/concentration of the agent in blood or plasma. For example, for a 10 mg dose of a given agent and a plasma concentration of 10 mg/L, the volume of distribution would be 1 liter. The volume of distribution reflects the extent to which an agent is present in the extravascular tissue. Large volumes of distribution reflect the tendency of agents to bind to the tissue components as compared with plasma proteins. In clinical settings, V_{dist} may be used to determine loading doses to achieve steady state concentrations. In some embodiments, volumes of distribution of compounds and/or compositions of the present invention when co-administered with one or more delivery agents as described herein may decrease at least about 2%, at least about 5%, at least about 10%, at least about 15%, at least about 20%, at least about 25%, at least about 30%, at least about 35%, at least about 40%, at least about 45%, at least about 50%, at least about 55%, at least about 60%, at least about 65%, at least about 70%.

### Formulation, Administration, Delivery and Dosing

[0425] In some embodiments, compounds and/or compositions of the present invention are pharmaceutical compositions. As used herein, the term “pharmaceutical composition” refers to a compound and/or composition of the present invention that has been formulated with one or more pharmaceutically acceptable excipients. In some embodiments, pharmaceutical compositions may optionally comprise one or more additional active substances, e.g. therapeutically and/or prophylactically active substances. General considerations in the formulation and/or manufacture of pharmaceutical agents may be found, for example, in Remington: The Science and Practice of Pharmacy 21^{st} ed., Lippincott Williams & Wilkins, 2005 (incorporated herein by reference).

[0426] In some embodiments, compositions may be administered to humans, human patients or subjects. For the purposes of the present disclosure, the phrase “active ingredient” generally refers to compounds and/or compositions of the present invention to be delivered as described herein.

[0427] Although the descriptions of pharmaceutical compositions provided herein are principally directed to pharmaceutical compositions which are suitable for administration to humans, it will be understood by the skilled artisan that such compositions are generally suitable for administration to other subjects, e.g., to non-human animals, e.g. non-human mammals. Modification of pharmaceutical compositions suitable for administration to humans in order to render the compositions suitable for administration to various animals is well understood, and the ordinarily skilled veterinary pharmacologist can design and/or perform such modification with merely ordinary, if any, experimentation. Subjects to which administration of pharmaceutical compositions is contemplated include, but are not limited to, humans and/or other primates; mammals, including commercially relevant mammals such as cattle, pigs, horses, sheep, cats, dogs, mice, and/or rats; and/or birds, including commercially relevant birds such as poultry, chickens, ducks, geese, and/or turkeys.

[0428] In some embodiments, formulations of the pharmaceutical compositions described herein may be prepared by any method known or hereafter developed in the art of pharmacology. In general, such preparatory methods include the step of bringing active ingredients into association with excipients and/or one or more other accessory ingredients, and then, if necessary and/or desirable, dividing, shaping and/or packaging products into desired single- or multi-dose units.

[0429] In some embodiments, pharmaceutical compositions of the present invention may be prepared, packaged, and/or sold in bulk, as single unit doses, and/or as a plurality of single unit doses. As used herein, the term “unit dose” refers to a discrete amount of the pharmaceutical composition comprising a predetermined amount of active ingredient. Amounts of active ingredient are generally equal to the dosage of active ingredients which would be administered to subjects and/or convenient fractions of such a dosages such as, for example, one-half or one-third of such a dosages.

[0430] In some embodiments, relative amounts of active ingredients, pharmaceutically acceptable excipients, and/or any additional ingredients in pharmaceutical compositions of the present invention may vary, depending upon identity, size, and/or condition of subjects to be treated and further depending upon routes by which compositions are to be administered. By way of example, compositions may comprise between about 0.1% and 100%, e.g., from about 0.5% to about 50%, from about 1% to about 30%, from about 5% to about 80% or at least 80% (w/w) active ingredient. In some embodiments, active ingredients are antibodies directed toward regulatory elements and/or GPCs.

### Formulations

[0431] Compounds and/or compositions of the present invention may be formulated using one or more excipients to: (1) increase stability; (2) increase cell permeability; (3) permit the sustained or delayed release (e.g., of compounds and/or growth factors from such formulations); and/or (4) alter the biodistribution (e.g., target compounds to specific tissues or cell types). In addition to traditional excipients such as any and all solvents, dispersion media, diluents, liquid vehicles, dispersion aids, suspension aids, surface active agents, isotonic agents, thickening agents, emulsifying agents and preservatives, formulations of the present invention may comprise, without limitation, liposomes, lipid nanoparticles, polymers, lipoplexes, core-shell nanoparticles, peptides, proteins, cells transfected with the compounds and/or compositions of the present invention (e.g., for transplantation into subjects) and combinations thereof.

### Excipients

[0432] Various excipients for formulating pharmaceutical compositions and techniques for preparing the composition are known in the art (see Remington: The Science and Practice of Pharmacy, 21^{st} Edition, A. R. Gennaro, Lippincott, Williams & Wilkins, Baltimore, Md., 2006; incorporated herein by reference).

[0433] In some embodiments, the use of conventional excipient media are contemplated within the scope of the present disclosure, except insofar as any conventional excipient media may be incompatible with substances and/or their derivatives, such as by producing any undesirable biological effects or otherwise interacting in deleterious manners with any other component(s) of pharmaceutical compositions.

[0434] Formulations of pharmaceutical compositions described herein may be prepared by any method known or hereafter developed in the art of pharmacology. In general, such preparatory methods include steps of associating active ingredients with excipients and/or other accessory ingredients.

[0435] Pharmaceutical compositions, in accordance with the present disclosure, may be prepared, packaged, and/or sold in bulk, as single unit doses, and/or as a plurality of single unit doses.

[0436] Relative amounts of active ingredients, pharmaceutically acceptable excipients, and/or additional ingredients in pharmaceutical compositions of the present disclosure may vary, depending upon identity, size, and/or condition of subjects being treated and further depending upon routes by which pharmaceutical compositions may be administered.

[0437] In some embodiments, pharmaceutically acceptable excipient are at least 95%, at least 96%, at least 97%, at least 98%, at least 99% or 100% pure. In some embodiments, excipients are approved for use in humans and/or for veterinary use. In some embodiments, excipients are approved by the United States Food and Drug Administration. In some embodiments, excipients are pharmaceutical grade. In some embodiments, excipients meet the standards of the United States Pharmacopoeia (USP), the European Pharmacopoeia (EP), the British Pharmacopoeia, and/or the International Pharmacopoeia.

[0438] In some embodiments, pharmaceutically acceptable excipients of the present invention may include, but are not limited to, inert diluents, dispersing and/or granulating agents, surface active agents and/or emulsifiers, disintegrating agents, binding agents, preservatives, buffering agents, lubricating agents, and/or oils. Such excipients may optionally be included in pharmaceutical compositions.

[0439] Exemplary diluents include, but are not limited to, calcium carbonate, sodium carbonate, calcium phosphate, dicalcium phosphate, calcium sulfate, calcium hydrogen phosphate, sodium phosphate lactose, sucrose, cellulose, microcrystalline cellulose, kaolin, mannitol, sorbitol, inositol, sodium chloride, dry starch, cornstarch, powdered sugar, etc., and/or combinations thereof.

[0440] Exemplary granulating and/or dispersing agents include, but are not limited to, potato starch, corn starch, tapioca starch, sodium starch glycolate, clays, alginic acid, guar gum, citrus pulp, agar, bentonite, cellulose and wood products, natural sponge, cation-exchange resins, calcium carbonate, silicates, sodium carbonate, cross-linked poly(vinyl-pyrrolidone) (crospovidone), sodium carboxymethyl starch (sodium starch glycolate), carboxymethyl cellulose, cross-linked sodium carboxymethyl cellulose (croscarmellose), methylcellulose, pregelatinized starch (starch 1500), microcrystalline starch, water insoluble starch, calcium carboxymethyl cellulose, magnesium aluminum silicate (VEEGUM®), sodium lauryl sulfate, quaternary ammonium compounds, etc., and/or combinations thereof.

[0441] Exemplary surface active agents and/or emulsifiers include, but are not limited to, natural emulsifiers (e.g. acacia, agar, alginic acid, sodium alginate, tragacanth, chondrux, cholesterol, xanthan, pectin, gelatin, egg yolk, casein, wool fat, cholesterol, wax, and lecithin), colloidal clays (e.g. bentonite [aluminum silicate] and VEEGUM® [magnesium aluminum silicate]), long chain amino acid derivatives, high molecular weight alcohols (e.g. stearyl alcohol, cetyl alcohol, oleyl alcohol, triacetin monostearate, ethylene glycol distearate, glyceryl monostearate, and propylene glycol monostearate, polyvinyl alcohol), carbomers (e.g. carboxy polymethylene, polyacrylic acid, acrylic acid polymer, and carboxyvinyl polymer), carrageenan, cellulosic derivatives (e.g. carboxymethylcellulose sodium, powdered cellulose, hydroxymethyl cellulose, hydroxypropyl cellulose, hydroxypropyl methylcellulose, methylcellulose), sorbitan fatty acid esters (e.g. polyoxyethylene sorbitan monolaurate [TWEEN®20], polyoxyethylene sorbitan [TWEENn®60], polyoxyethylene sorbitan monooleate [TWEEN®80], sorbitan monopalmitate [SPAN®40], sorbitan monostearate [Span®60], sorbitan tristearate [Span® 65], glyceryl monooleate, sorbitan monooleate [SPAN®80]), polyoxyethylene esters (e.g. polyoxyethylene monostearate [MYRJ®45], polyoxyethylene hydrogenated castor oil, polyethoxylated castor oil, polyoxymethylene stearate, and SOLUTOL®), sucrose fatty acid esters, polyethylene glycol fatty acid esters (e.g. CREMOPHOR®), polyoxyethylene ethers, (e.g. polyoxyethylene lauryl ether [BRIJ®30]), poly(vinyl-pyrrolidone), diethylene glycol monolaurate, triethanolamine oleate, sodium oleate, potassium oleate, ethyl oleate, oleic acid, ethyl laurate, sodium lauryl sulfate, PLUORINC®F 68, POLOXAMER 188, cetrimonium bromide, cetylpyridinium chloride, benzalkonium chloride, docusate sodium, etc. and/or combinations thereof.

[0442] Exemplary binding agents include, but are not limited to, starch (e.g. cornstarch and starch paste); gelatin; sugars (e.g. sucrose, glucose, dextrose, dextrin, molasses, lactose, lactitol, mannitol); natural and synthetic gums (e.g. acacia, sodium alginate, extract of Irish moss, panwar gum, ghatti gum, mucilage of isapol husks, carboxymethylcellulose, methylcellulose, ethylcellulose, hydroxyethylcellulose, hydroxypropyl cellulose, hydroxypropyl methylcellulose, microcrystalline cellulose, cellulose acetate, poly(vinyl-pyrrolidone), magnesium aluminum silicate (Veegum®), and larch arabogalactan); alginates; polyethylene oxide; polyethylene glycol; inorganic calcium salts; silicic acid; polymethacrylates; waxes; water; alcohol; etc.; and combinations thereof.

[0443] Exemplary preservatives may include, but are not limited to, antioxidants, chelating agents, antimicrobial preservatives, antifungal preservatives, alcohol preservatives, acidic preservatives, and/or other preservatives. Exemplary antioxidants include, but are not limited to, alpha tocopherol, ascorbic acid, acorbyl palmitate, butylated hydroxyanisole, butylated hydroxytoluene, monothioglycerol, potassium metabisulfite, propionic acid, propyl gallate, sodium ascorbate, sodium bisulfite, sodium metabisulfite, and/or sodium sulfite. Exemplary chelating agents include ethylenediaminetetraacetic acid (EDTA), citric acid monohydrate, disodium edetate, dipotassium edetate, edetic acid, fumaric acid, malic acid, phosphoric acid, sodium edetate, tartaric acid, and/or trisodium edetate. Exemplary antimicrobial preservatives include, but are not limited to, benzalkonium chloride, benzethonium chloride, benzyl alcohol, bronopol, cetrimide, cetylpyridinium chloride, chlorhexidine, chlorobutanol, chlorocresol, chloroxylenol, cresol, ethyl alcohol, glycerin, hexetidine, imidurea, phenol, phenoxyethanol, phenylethyl alcohol, phenylmercuric nitrate, propylene glycol, and/or thimerosal. Exemplary antifungal preservatives include, but are not limited to, butyl paraben, methyl paraben, ethyl paraben, propyl paraben, benzoic acid, hydroxybenzoic acid, potassium benzoate, potassium sorbate, sodium benzoate, sodium propionate, and/or sorbic acid. Exemplary alcohol preservatives include, but are not limited to, ethanol, polyethylene glycol, phenol, phenolic compounds, bisphenol, chlorobutanol, hydroxybenzoate, and/or phenylethyl alcohol. Exemplary acidic preservatives include, but are not limited to, vitamin A, vitamin C, vitamin E, beta-carotene, citric acid, acetic acid, dehydroacetic acid, ascorbic acid, sorbic acid, and/or phytic acid. Other preservatives include, but are not limited to, tocopherol, tocopherol acetate, deteroxime mesylate, cetrimide, butylated hydroxyanisol (BHA), butylated hydroxytoluened (BHT), ethylenediamine, sodium lauryl sulfate (SLS), sodium lauryl ether sulfate (SLES), sodium bisulfite, sodium metabisulfite, potassium sulfite, potassium metabisulfite, GLYDANT PLUS®, PHENONIP®, methylparaben, GERMALL®115, GERMABEN®II, NEOLONE™ KATHON™, and/or EUXYL®.

[0444] Exemplary buffering agents include, but are not limited to, citrate buffer solutions, acetate buffer solutions, phosphate buffer solutions, ammonium chloride, calcium carbonate, calcium chloride, calcium citrate, calcium glubionate, calcium gluceptate, calcium gluconate, D-gluconic acid, calcium glycerophosphate, calcium lactate, propanoic acid, calcium levulinate, pentanoic acid, dibasic calcium phosphate, phosphoric acid, tribasic calcium phosphate, calcium hydroxide phosphate, potassium acetate, potassium chloride, potassium gluconate, potassium mixtures, dibasic potassium phosphate, monobasic potassium phosphate, potassium phosphate mixtures, sodium acetate, sodium bicarbonate, sodium chloride, sodium citrate, sodium lactate, dibasic sodium phosphate, monobasic sodium phosphate, sodium phosphate mixtures, tromethamine, magnesium hydroxide, aluminum hydroxide, alginic acid, pyrogen-free water, isotonic saline, Ringer's solution, ethyl alcohol, etc., and/or combinations thereof.

[0445] Exemplary lubricating agents include, but are not limited to, magnesium stearate, calcium stearate, stearic acid, silica, talc, malt, glyceryl behanate, hydrogenated vegetable oils, polyethylene glycol, sodium benzoate, sodium acetate, sodium chloride, leucine, magnesium lauryl sulfate, sodium lauryl sulfate, etc., and combinations thereof.

[0446] Exemplary oils include, but are not limited to, almond, apricot kernel, avocado, babassu, bergamot, black current seed, borage, cade, camomile, canola, caraway, carnauba, castor, cinnamon, cocoa butter, coconut, cod liver, coffee, corn, cotton seed, emu, eucalyptus, evening primrose, fish, flaxseed, geraniol, gourd, grape seed, hazel nut, hyssop, isopropyl myristate, jojoba, kukui nut, lavandin, lavender, lemon, litsea cubeba, macademia nut, mallow, mango seed, meadowfoam seed, mink, nutmeg, olive, orange, orange roughy, palm, palm kernel, peach kernel, peanut, poppy seed, pumpkin seed, rapeseed, rice bran, rosemary, safflower, sandalwood, sasquana, savoury, sea buckthorn, sesame, shea butter, silicone, soybean, sunflower, tea tree, thistle, tsubaki, vetiver, walnut, and wheat germ oils. Exemplary oils include, but are not limited to, butyl stearate, caprylic triglyceride, capric triglyceride, cyclomethicone, diethyl sebacate, dimethicone 360, isopropyl myristate, mineral oil, octyldodecanol, oleyl alcohol, silicone oil, and/or combinations thereof.

[0447] Excipients such as cocoa butter and suppository waxes, coloring agents, coating agents, sweetening, flavoring, and/or perfuming agents can be present in the composition, according to the judgment of the formulator.

### Formulation Vehicles: Liposomes, Lipoplexes, and Lipid Nanoparticles

[0448] Compounds and/or compositions of the present invention may be formulated using one or more liposomes, lipoplexes and/or lipid nanoparticles. In some embodiments, pharmaceutical compositions comprise liposomes. Liposomes are artificially-prepared vesicles which may primarily be composed of a lipid bilayer and may be used as delivery vehicles for the administration of nutrients and pharmaceutical formulations. Liposomes may be of different sizes such as, but not limited to, multilamellar vesicles (MLVs) which may be hundreds of nanometers in diameter and may contain a series of concentric bilayers separated by narrow aqueous compartments, small unicellular vesicle (SUVs) which may be smaller than 50 nm in diameter and large unilamellar vesicle (LUVs) which may be between 50 and 500 nm in diameter. Liposome components may include, but are not limited to, opsonins or ligands in order to improve the attachment of liposomes to unhealthy tissue or to activate events such as, but not limited to, endocytosis. Liposomes may comprise low or high pH. In some embodiments, liposome pH may be varied in order to improve delivery of pharmaceutical formulations.

[0449] In some embodiments, liposome formation may depend on physicochemical characteristics such as, but not limited to, the pharmaceutical formulation entrapped, liposomal ingredients, the nature of the medium in which lipid vesicles are dispersed, the effective concentration of entrapped substances, potential toxicity of entrapped substances, additional processes involved during the application and/or delivery of vesicles, optimization size, polydispersity, shelf-life of vesicles for the intended application, batch-to-batch reproducibility and possibility of large-scale production of safe and efficient liposomal products.

[0450] In some embodiments, formulations may be assembled or compositions altered such that they are passively or actively directed to different cell types in vivo.

[0451] In some embodiments, formulations may be selectively targeted through expression of different ligands on formulation surfaces as exemplified by, but not limited by, folate, transferrin, N-acetylgalactosamine (GalNAc), and antibody targeted approaches.

[0452] In some embodiments, pharmaceutical compositions of the present invention may be formulated with liposomes, lipoplexes and/or lipid nanoparticles to improve efficacy of function. Such formulations may be able to increase cell transfection by pharmaceutical compositions. In some embodiments, liposomes, lipoplexes, or lipid nanoparticles may be used to increase pharmaceutical composition stability.

[0453] In some embodiments, liposomes are specifically formulated for pharmaceutical compositions comprising one or more antibodies. Such liposomes may be prepared according to techniques known in the art, such as those described by Eppstein et al. (Eppstein, D. A. et al., Biological activity of liposome-encapsulated murine interferon gamma is mediated by a cell membrane receptor. Proc Natl Acad Sci USA. 1985 June; 82(11):3688-92); Hwang et al. (Hwang, K. J. et al., Hepatic uptake and degradation of unilamellar sphingomyelin/cholesterol liposomes: a kinetic study. Proc Natl Acad Sci USA. 1980 July; 77(7):4030-4); U.S. Pat. No. 4,485,045 and U.S. Pat. No. 4,544,545. Production of liposomes with sustained circulation time are also described in U.S. Pat. No. 5,013,556.

[0454] In some embodiments, liposomes of the present invention comprising antibodies may be generated using reverse phase evaporation utilizing lipids such as phosphatidylcholine, cholesterol as well as phosphatidylethanolamine that have been polyethylene glycol-derivatized. Filters with defined pore size are used to extrude liposomes of the desired diameter. In another embodiment, compounds and/or compositions of the present invention may be conjugated to external surfaces of liposomes by disulfide interchange reactions as is described by Martin et al. (Martin, F. J. et al., Irreversible coupling of immunoglobulin fragments to preformed vesicles. An improved method for liposome targeting. J Biol Chem. 1982 Jan. 10; 257(1):286-8).

### Formulation Vehicles: Polymers and Nanoparticles

[0455] Compounds and/or compositions of the present invention may be formulated using natural and/or synthetic polymers. Non-limiting examples of polymers which may be used for delivery include, but are not limited to DMRI/DOPE, poloxamer, chitosan, cyclodextrin, and poly(lactic-co-glycolic acid) (PLGA) polymers. In some embodiments, polymers may be biodegradable.

[0456] In some embodiments, polymer formulation may permit sustained and/or delayed release of compounds and/or compositions (e.g., following intramuscular and/or subcutaneous injection). Altered release profile for compounds and/or compositions of the present invention may result in, for example, compound release over an extended period of time. Polymer formulations may also be used to increase the stability of compounds and/or compositions of the present invention.

[0457] In some embodiments, polymer formulations may be selectively targeted through expression of different ligands as exemplified by, but not limited by, folate, transferrin, and N-acetylgalactosamine (GalNAc) (Benoit, D. S. et al., Synthesis of folate-functionalized RAFT polymers for targeted siRNA delivery. Biomacromolecules. 2011 12:2708-14; Rozema, D. B. et al., Dynamic polyconjugates for targeted in vivo delivery of siRNA to hepatocytes. Proc Natl Acad Sci USA. 2007 104:12982-12887; Davis, M. E. et al., The first targeted delivery of siRNA in humans via a self-assembling, cyclodextrin polymer-based nanoparticle: from concept to clinic. Mol Pharm. 2009 6:659-668; Davis, M. E. et al., Evidence of RNAi in humans from systemically administered siRNA via targeted nanoparticles. Nature. 2010. 464:1067-70; the contents of each of which are herein incorporated by reference in their entirety).

[0458] Compounds and/or compositions of the present invention may be formulated as nanoparticles using combinations of polymers, lipids, and/or other biodegradable agents, such as, but not limited to, calcium phosphates. In some embodiments, components may be combined in core-shells, hybrids, and/or layer-by-layer architectures, to allow for fine-tuning of nanoparticle structure, so delivery may be enhanced. For antibodies of the present invention, systems based on poly(2-(methacryloyloxy)ethyl phosphorylcholine)-block-(2-(diisopropylamino)ethyl methacrylate), (PMPC-PDPA), a pH sensitive diblock copolymer that self-assembles to form nanometer-sized vesicles, also known as polymersomes, at physiological pH may be used. These polymersomes have been shown to successfully deliver relatively high antibody payloads within live cells. (Massignani, M. et al., Cellular delivery of antibodies: effective targeted subcellular imaging and new therapeutic tool. Nature Proceedings. 2010. p 1-17).

[0459] In some embodiments, PEG-charge-conversional polymers (Pitella, F. et al., Enhanced endosomal escape of siRNA-incorporating hybrid nanoparticles from calcium phosphate and PEG-block charge-conversional polymer for efficient gene knockdown with negligible cytotoxicity. Biomaterials. 2011 32:3106-14) may be used to form nanoparticles for delivery of compounds and/or compositions of the present invention. In some embodiments, PEG-charge-conversional polymers may improve upon PEG-polyanion block copolymers by being cleaved into polycations at acidic pH, thus enhancing endosomal escape.

[0460] In some embodiments, complexation, delivery and/or internalization of polymeric nanoparticles may be precisely controlled by altering chemical compositions in both core and shell nanoparticle components (Siegwart, D. J. et al., Combinatorial synthesis of chemically diverse core-shell nanoparticles for intracellular delivery. Proc Natl Acad Sci USA. 2011 108:12996-3001).

[0461] In some embodiments, matrices of poly(ethylene-co-vinyl acetate), are used to deliver compounds and/or compositions of the invention. Such matrices have bee described by others (Sherwood, J. K. et al., Controlled antibody delivery systems. Nature Biotechnology. 1992. 10:1446-9).

### Antibody Formulations

[0462] Antibodies of the present invention may be formulated for intravenous administration or extravascular administration (Daugherty, et al., Formulation and delivery issues for monoclonal antibody therapeutics. Adv Drug Deliv Rev. 2006 Aug. 7; 58(5-6):686-706 and US patent application publication number US2011/0135570, the contents of each of which are herein incorporated by reference in their entirety). Extravascular administration routes may include, but are not limited to subcutaneous administration, intraperitoneal administration, intracerebral administration, intraocular administration, intralesional administration, topical administration and intramuscular administration.

[0463] In some embodiments, antibody structures may be modified to improve effectiveness as therapeutics. Improvements may include, but are not limited to improved thermodynamic stability, reduced Fc receptor binding properties and/or improved folding efficiency. Modifications may include, but are not limited to amino acid substitutions, glycosylation, palmitoylation and/or protein conjugation.

[0464] In some embodiments, antibodies of the present invention may be formulated with antioxidants to reduce antibody oxidation. Antibodies of the present invention may also be formulated with additives to reduce protein aggregation. Such additives may include, but are not limited to albumin, amino acids, sugars, urea, guanidinium chloride, polyalchohols, polymers (such as polyethylene glycol and dextrans), surfactants (including, but not limited to polysorbate 20 and polysorbate 80) or even other antibodies.

[0465] In some embodiments, antibodies of the present invention may be formulated to reduce the impact of water on antibody structure and function. Antibody preparartions in such formulations may be may be lyophilized. Formulations subject to lyophilization may include carbohydrates or polyol compounds to protect and/or stabilize antibody structure. Such compounds may include, but are not limited to sucrose, trehalose and mannitol.

[0466] In some embodiments, antibodies of the present invention may be formulated with polymers. In some embodiments, polymer formulations may comprise hydrophobic polymers. Such polymers may be microspheres formulated with polylactide-co-glycolide through solid-in-oil-in-water encapsulation methods. In some embodiments, microspheres comprising ethylene-vinyl acetate copolymer may also be used for antibody delivery and/or to extend the time course of antibody release at sites of delivery. In some embodiments, polymers may be aqueous gels. Such gels may, for example, comprise carboxymethylcellulose. In some embodiments, aqueous gels may also comprise hyaluronic acid hydrogels. In some embodiments, antibodies may be covalently linked to such gels through hydrazone linkages that allow for sustained delivery in tissues, including but not limited to tissues of the central nervous system.

### Formulation Vehicles: Peptides and Proteins

[0467] Compounds and/or compositions of the present invention may be formulated with peptides and/or proteins. In some embodiments, peptides such as, but not limited to, cell penetrating peptides and/or proteins/peptides that enable intracellular delivery may be used to deliver pharmaceutical formulations. Non-limiting examples of a cell penetrating peptides which may be used with pharmaceutical formulations of the present invention include cell-penetrating peptide sequences attached to polycations that facilitates delivery to the intracellular space, e.g., HIV-derived TAT peptide, penetratins, transportans, or hCT derived cell-penetrating peptides (see, e.g. Caron, N.J. et al., Intracellular delivery of a Tat-eGFP fusion protein into muscle cells. Mol Ther. 2001. 3(3):310-8; Langel, U., Cell-Penetrating Peptides: Processes and Applications, CRC Press, Boca Raton Fla., 2002; El-Andaloussi, S. et al., Cell-penetrating peptides: mechanisms and applications. Curr Pharm Des. 2003. 11(28):3597-611; and Deshayes, S. et al., Cell-penetrating peptides: tools for intracellular delivery of therapeutics. Cell Mol Life Sci. 2005. 62(16):1839-49, the contents of each of which are herein incorporated by reference in their entirety). Compounds and/or compositions of the present invention may also be formulated to include cell penetrating agents, e.g., liposomes, which enhance delivery of the compositions to intracellular spaces. Compounds and/or compositions of the present invention may be complexed with peptides and/or proteins such as, but not limited to, peptides and/or proteins from Aileron Therapeutics (Cambridge, Mass.) and Permeon Biologics (Cambridge, Mass.) in order to enable intracellular delivery (Cronican, J. J. et al., Potent delivery of functional proteins into mammalian cells in vitro and in vivo using a supercharged protein. ACS Chem Biol. 2010. 5:747-52; McNaughton, B. R. et al., Mammalian cell penetration, siRNA transfection, and DNA transfection by supercharged proteins. Proc Natl Acad Sci, USA. 2009. 106:6111-6; Verdine, G. L. et al., Stapled peptides for intracellular drug targets. Methods Enzymol. 2012. 503:3-33; the contents of each of which are herein incorporated by reference in their entirety).

[0468] In some embodiments, the cell-penetrating polypeptides may comprise first and second domains. First domains may comprise supercharged polypeptides. Second domains may comprise protein-binding partner. As used herein, protein-binding partners may include, but are not limited to, antibodies and functional fragments thereof, scaffold proteins and/or peptides. Cell-penetrating polypeptides may further comprise intracellular binding partners for protein-binding partners. In some embodiments, cell-penetrating polypeptides may be capable of being secreted from cells where compounds and/or compositions of the present invention may be introduced.

[0469] Compositions of the present invention comprising peptides and/or proteins may be used to increase cell transfection and/or alter compound/composition biodistribution (e.g., by targeting specific tissues or cell types).

### Formulation Vehicles: Cells

[0470] Cell-based formulations of compounds and/or compositions of the present invention may be used to ensure cell transfection (e.g., in cellular carriers) or to alter biodistribution (e.g., by targeting cell carriers to specific tissues or cell types).

### Cell Transfer Methods

[0471] A variety of methods are known in the art and suitable for introduction of nucleic acids or proteins into cells, including viral and non-viral mediated techniques. Examples of typical non-viral mediated techniques include, but are not limited to, electroporation, calcium phosphate mediated transfer, nucleofection, sonoporation, heat shock, magnetofection, liposome mediated transfer, microinjection, microprojectile mediated transfer (nanoparticles), cationic polymer mediated transfer (DEAE-dextran, polyethylenimine, polyethylene glycol (PEG) and the like) or cell fusion.

[0472] The technique of sonoporation, or cellular sonication, is the use of sound (e.g., ultrasonic frequencies) for modifying the permeability of cell plasma membranes. Sonoporation methods are known to those in the art and are used to deliver nucleic acids in vivo (Yoon, C. S. et al., Ultrasound-mediated gene delivery. Expert Opin Drug Deliv. 2010 7:321-30; Postema, M. et al., Ultrasound-directed drug delivery. Curr Pharm Biotechnol. 2007 8:355-61; Newman, C. M. et al., Gene therapy progress and prospects: ultrasound for gene transfer. Gene Ther. 2007. 14(6):465-75; the contents of each of which are herein incorporated by reference in their entirety). Sonoporation methods are known in the art and are also taught for example as they relate to bacteria in US Patent application publication US2010/0196983 and as it relates to other cell types in, for example, US Patent application publication US2010/0009424, the contents of each of which are incorporated herein by reference in their entirety.

[0473] Electroporation techniques are also well known in the art and are used to deliver nucleic acids in vivo and clinically (Andre, F. M. et al., Nucleic acids electrotransfer in vivo: mechanisms and practical aspects. Curr Gene Ther. 2010 10:267-80; Chiarella, P. et al., Application of electroporation in DNA vaccination protocols. Curr Gene Ther. 2010. 10:281-6; Hojman, P., Basic principles and clinical advancements of muscle electrotransfer. Curr Gene Ther. 2010 10:128-38; the contents of each of which are herein incorporated by reference in their entirety). In some embodiments, compounds and/or compositions of the present invention may be delivered by electroporation.

### Administration and Delivery

[0474] Compounds and/or compositions of the present invention may be administered by any of the standard methods or routes known in the art. Such methods may include any route which results in a therapeutically effective outcome. These include, but are not limited to enteral, gastroenteral, epidural, oral, transdermal, epidural (peridural), intracerebral (into the cerebrum), intracerebroventricular (into the cerebral ventricles), epicutaneous (application onto the skin), intradermal, (into the skin itself), subcutaneous (under the skin), nasal administration (through the nose), intravenous (into a vein), intraarterial (into an artery), intramuscular (into a muscle), intracardiac (into the heart), intraosseous infusion (into the bone marrow), intrathecal (into the spinal canal), intraperitoneal, (infusion or injection into the peritoneum), intravesical infusion, intravitreal, (through the eye), intracavernous injection, (into the base of the penis), intravaginal administration, intrauterine, extra-amniotic administration, transdermal (diffusion through the intact skin for systemic distribution), transmucosal (diffusion through a mucous membrane), insufflation (snorting), sublingual, sublabial, enema, eye drops (onto the conjunctiva), or in ear drops. In specific embodiments, compounds and/or compositions of the present invention may be administered in ways which allow them to cross the blood-brain barrier, vascular barriers, or other epithelial barriers. Methods of formulation and administration may include any of those disclosed in US Pub. No. 2013/0122007, U.S. Pat. No. 8,415,459 or International Pub. No. WO 2011/151432, the contents of each of which are herein incorporated by reference in their entirety. Non-limiting routes of administration for compounds and/or compositions of the present invention are described below.

### Parenteral and Injectible Administration

[0475] In some embodiments, compounds and/or compositions of the present invention may be administered parenterally. Liquid dosage forms for oral and parenteral administration include, but are not limited to, pharmaceutically acceptable emulsions, microemulsions, solutions, suspensions, syrups, and/or elixirs. In addition to active ingredients, liquid dosage forms may comprise inert diluents commonly used in the art such as, for example, water or other solvents, solubilizing agents and emulsifiers such as ethyl alcohol, isopropyl alcohol, ethyl carbonate, ethyl acetate, benzyl alcohol, benzyl benzoate, propylene glycol, 1,3-butylene glycol, dimethylformamide, oils (in particular, cottonseed, groundnut, corn, germ, olive, castor, and sesame oils), glycerol, tetrahydrofurfuryl alcohol, polyethylene glycols and fatty acid esters of sorbitan, and mixtures thereof. Besides inert diluents, oral compositions can include adjuvants such as wetting agents, emulsifying and suspending agents, sweetening, flavoring, and/or perfuming agents. In certain embodiments for parenteral administration, compositions are mixed with solubilizing agents such as CREMOPHOR®, alcohols, oils, modified oils, glycols, polysorbates, cyclodextrins, polymers, and/or combinations thereof. In other embodiments, surfactants are included such as hydroxypropylcellulose.

[0476] Injectable preparations, for example, sterile injectable aqueous or oleaginous suspensions may be formulated according to the known art using suitable dispersing agents, wetting agents, and/or suspending agents. Sterile injectable preparations may be sterile injectable solutions, suspensions, and/or emulsions in nontoxic parenterally acceptable diluents and/or solvents, for example, as a solution in 1,3-butanediol. Among the acceptable vehicles and solvents that may be employed are water, Ringer's solution, U.S.P., and isotonic sodium chloride solution. Sterile, fixed oils are conventionally employed as a solvent or suspending medium. For this purpose any bland fixed oil can be employed including synthetic mono- or diglycerides. Fatty acids such as oleic acid can be used in the preparation of injectables.

[0477] Injectable formulations may be sterilized, for example, by filtration through a bacterial-retaining filter, and/or by incorporating sterilizing agents in the form of sterile solid compositions which can be dissolved or dispersed in sterile water or other sterile injectable medium prior to use.

[0478] In order to prolong the effect of active ingredients, it is often desirable to slow the absorption of active ingredients from subcutaneous or intramuscular injections. This may be accomplished by the use of liquid suspensions of crystalline or amorphous material with poor water solubility. The rate of absorption of active ingredients depends upon the rate of dissolution which, in turn, may depend upon crystal size and crystalline form. Alternatively, delayed absorption of a parenterally administered drug form is accomplished by dissolving or suspending the drug in an oil vehicle. Injectable depot forms are made by forming microencapsule matrices of the drug in biodegradable polymers such as polylactide-polyglycolide. Depending upon the ratio of drug to polymer and the nature of the particular polymer employed, the rate of drug release can be controlled. Examples of other biodegradable polymers include poly(orthoesters) and poly(anhydrides). Depot injectable formulations are prepared by entrapping the drug in liposomes or microemulsions which are compatible with body tissues.

### Rectal and Vaginal Administration

[0479] In some embodiments, compounds and/or compositions of the present invention may be administered rectally and/or vaginally. Compositions for rectal or vaginal administration are typically suppositories which can be prepared by mixing compositions with suitable non-irritating excipients such as cocoa butter, polyethylene glycol or a suppository wax which are solid at ambient temperature but liquid at body temperature and therefore melt in the rectum or vaginal cavity and release the active ingredient.

### Oral Administration

[0480] In some embodiments, compounds and/or compositions of the present invention may be administered orally. Solid dosage forms for oral administration include capsules, tablets, pills, powders, and granules. In such solid dosage forms, an active ingredient is mixed with at least one inert, pharmaceutically acceptable excipient such as sodium citrate or dicalcium phosphate and/or fillers or extenders (e.g. starches, lactose, sucrose, glucose, mannitol, and silicic acid), binders (e.g. carboxymethylcellulose, alginates, gelatin, polyvinylpyrrolidinone, sucrose, and acacia), humectants (e.g. glycerol), disintegrating agents (e.g. agar, calcium carbonate, potato or tapioca starch, alginic acid, certain silicates, and sodium carbonate), solution retarding agents (e.g. paraffin), absorption accelerators (e.g. quaternary ammonium compounds), wetting agents (e.g. cetyl alcohol and glycerol monostearate), absorbents (e.g. kaolin and bentonite clay), and lubricants (e.g. talc, calcium stearate, magnesium stearate, solid polyethylene glycols, sodium lauryl sulfate), and mixtures thereof. In the case of capsules, tablets and pills, the dosage form may comprise buffering agents.

### Topical or Transdermal Administration

[0481] As described herein, compounds and/or compositions of the present invention may be formulated for administration topically. The skin may be an ideal target site for delivery as it is readily accessible. Three routes are commonly considered to deliver compounds and/or compositions of the present invention to the skin: (i) topical application (e.g. for local/regional treatment and/or cosmetic applications); (ii) intradermal injection (e.g. for local/regional treatment and/or cosmetic applications); and (iii) systemic delivery (e.g. for treatment of dermatologic diseases that affect both cutaneous and extracutaneous regions). Compounds and/or compositions of the present invention can be delivered to the skin by several different approaches known in the art.

[0482] In some embodiments, the invention provides for a variety of dressings (e.g., wound dressings) or bandages (e.g., adhesive bandages) for conveniently and/or effectively carrying out methods of the present invention. Typically dressing or bandages may comprise sufficient amounts of compounds and/or compositions of the present invention described herein to allow users to perform multiple treatments.

[0483] Dosage forms for topical and/or transdermal administration may include ointments, pastes, creams, lotions, gels, powders, solutions, sprays, inhalants and/or patches. Generally, active ingredients are admixed under sterile conditions with pharmaceutically acceptable excipients and/or any needed preservatives and/or buffers. Additionally, the present invention contemplates the use of transdermal patches, which often have the added advantage of providing controlled delivery of compounds and/or compositions of the present invention to the body. Such dosage forms may be prepared, for example, by dissolving and/or dispensing compounds and/or compositions in the proper medium. Alternatively or additionally, rates may be controlled by either providing rate controlling membranes and/or by dispersing compounds and/or compositions in a polymer matrix and/or gel.

[0484] Formulations suitable for topical administration include, but are not limited to, liquid and/or semi liquid preparations such as liniments, lotions, oil in water and/or water in oil emulsions such as creams, ointments and/or pastes, and/or solutions and/or suspensions.

[0485] Topically-administrable formulations may, for example, comprise from about 1% to about 10% (w/w) active ingredient, although the concentration of active ingredient may be as high as the solubility limit of the active ingredient in the solvent. Formulations for topical administration may further comprise one or more of the additional ingredients described herein.

### Depot Administration

[0486] As described herein, in some embodiments, compounds and/or compositions of the present invention are formulated in depots for extended release. Generally, specific organs or tissues (“target tissues”) are targeted for administration.

[0487] In some aspects of the invention, compounds and/or compositions of the present invention are spatially retained within or proximal to target tissues. Provided are method of providing compounds and/or compositions to target tissues of mammalian subjects by contacting target tissues (which comprise one or more target cells) with compounds and/or compositions under conditions such that they are substantially retained in target tissues, meaning that at least 10, 20, 30, 40, 50, 60, 70, 80, 85, 90, 95, 96, 97, 98, 99, 99.9, 99.99 or greater than 99.99% of the composition is retained in the target tissues. Advantageously, retention is determined by measuring the amount of compounds and/or compositions that enter one or more target cells. For example, at least 1%, 5%, 10%, 20%, 30%, 40%, 50%, 60%, 70%, 80%, 85%, 90%, 95%, 96%, 97%, 98%, 99%, 99.9%, 99.99% or greater than 99.99% of compounds and/or compositions administered to subjects are present intracellularly at a period of time following administration. For example, intramuscular injection to mammalian subjects may be performed using aqueous compositions comprising compounds and/or compositions of the present invention and one or more transfection reagent, and retention is determined by measuring the amount of compounds and/or compositions present in muscle cells.

[0488] Certain aspects of the invention are directed to methods of providing compounds and/or compositions of the present invention to a target tissues of mammalian subjects, by contacting target tissues (comprising one or more target cells) with compounds and/or compositions under conditions such that they are substantially retained in such target tissues. Compounds and/or compositions comprise enough active ingredient such that the effect of interest is produced in at least one target cell. In some embodiments, compounds and/or compositions generally comprise one or more cell penetration agents, although “naked” formulations (such as without cell penetration agents or other agents) are also contemplated, with or without pharmaceutically acceptable carriers.

[0489] In some embodiments, the amount of a growth factor present in cells in a tissue is desirably increased. Preferably, this increase in growth factor is spatially restricted to cells within the target tissue. Thus, provided are methods of increasing the amount of growth factor of interest in tissues of mammalian subjects. In some embodiments, formulations are provided comprising compounds and/or compositions characterized in that the unit quantity provided has been determined to produce a desired level of growth factor of interest in a substantial percentage of cells contained within predetermined volumes of target tissue.

[0490] In some embodiments, formulations comprise a plurality of different compounds and/or compositions, where one or more than one targets biomolecules of interest. Optionally, formulations may also comprise cell penetration agents to assist in the intracellular delivery of compounds and/or compositions. In such embodiments, determinations are made of compound and/or composition dose required to target biomolecules of interest in substantial percentages of cells contained within predetermined volumes of the target tissue (generally, without targeting biomolecules of interest in adjacent or distal tissues). Determined doses are then introduced directly into subject tissues. In some embodiments, the invention provides for compounds and/or compositions to be delivered in more than one administration or by split dose administration.

### Pulmonary Administration

[0491] In some embodiments, compounds and/or compositions of the present invention may be prepared, packaged, and/or sold in formulations suitable for pulmonary administration. In some embodiments, such administration is via the buccal cavity. In some embodiments, formulations may comprise dry particles comprising active ingredients. In such embodiments, dry particles may have a diameter in the range from about 0.5 nm to about 7 nm or from about 1 nm to about 6 nm. In some embodiments, formulations may be in the form of dry powders for administration using devices comprising dry powder reservoirs to which streams of propellant may be directed to disperse such powder. In some embodiments, self propelling solvent/powder dispensing containers may be used. In such embodiments, active ingredients may be dissolved and/or suspended in low-boiling propellant in sealed containers. Such powders may comprise particles wherein at least 98% of the particles by weight have diameters greater than 0.5 nm and at least 95% of the particles by number have diameters less than 7 nm. Alternatively, at least 95% of the particles by weight have a diameter greater than 1 nm and at least 90% of the particles by number have a diameter less than 6 nm. Dry powder compositions may include a solid fine powder diluent such as sugar and are conveniently provided in a unit dose form.

[0492] Low boiling propellants generally include liquid propellants having a boiling point of below 65° F. at atmospheric pressure. Generally propellants may constitute 50% to 99.9% (w/w) of the composition, and active ingredient may constitute 0.1% to 20% (w/w) of the composition. Propellants may further comprise additional ingredients such as liquid non-ionic and/or solid anionic surfactant and/or solid diluent (which may have particle sizes of the same order as particles comprising active ingredients).

[0493] Pharmaceutical compositions formulated for pulmonary delivery may provide active ingredients in the form of droplets of solution and/or suspension. Such formulations may be prepared, packaged, and/or sold as aqueous and/or dilute alcoholic solutions and/or suspensions, optionally sterile, comprising active ingredients, and may conveniently be administered using any nebulization and/or atomization device. Such formulations may further comprise one or more additional ingredients including, but not limited to, a flavoring agent such as saccharin sodium, a volatile oil, a buffering agent, a surface active agent, and/or a preservative such as methylhydroxybenzoate. Droplets provided by this route of administration may have an average diameter in the range from about 0.1 nm to about 200 nm.

### Intranasal, Nasal and Buccal Administration

[0494] In some embodiments, compounds and/or compositions of the present invention may be administered nasally and/or intranasally. In some embodiments, formulations described herein as being useful for pulmonary delivery may also be useful for intranasal delivery. In some embodiments, formulations for intranasal administration comprise a coarse powder comprising the active ingredient and having an average particle from about 0.2 μm to 500 μm. Such formulations are administered in the manner in which snuff is taken, i.e. by rapid inhalation through the nasal passage from a container of the powder held close to the nose.

[0495] Formulations suitable for nasal administration may, for example, comprise from about as little as 0.1% (w/w) and as much as 100% (w/w) of active ingredient, and may comprise one or more of the additional ingredients described herein. A pharmaceutical composition may be prepared, packaged, and/or sold in a formulation suitable for buccal administration. Such formulations may, for example, be in the form of tablets and/or lozenges made using conventional methods, and may, for example, 0.1% to 20% (w/w) active ingredient, the balance comprising an orally dissolvable and/or degradable composition and, optionally, one or more of the additional ingredients described herein. Alternately, formulations suitable for buccal administration may comprise powders and/or an aerosolized and/or atomized solutions and/or suspensions comprising active ingredients. Such powdered, aerosolized, and/or aerosolized formulations, when dispersed, may comprise average particle and/or droplet sizes in the range of from about 0.1 nm to about 200 nm, and may further comprise one or more of any additional ingredients described herein.

### Ophthalmic or Otic Administration

[0496] In some embodiments, compounds and/or compositions of the present invention may be prepared, packaged, and/or sold in formulations suitable for ophthalmic and/or otic administration. Such formulations may, for example, be in the form of eye and/or ear drops including, for example, a 0.1/1.0% (w/w) solution and/or suspension of the active ingredient in aqueous and/or oily liquid excipients. Such drops may further comprise buffering agents, salts, and/or one or more other of any additional ingredients described herein. Other ophthalmically-administrable formulations which are useful include those which comprise active ingredients in microcrystalline form and/or in liposomal preparations. Subretinal inserts may also be used as forms of administration.

### Payload Administration: Detectable Agents and Therapeutic Agents

[0497] In some embodiments, compounds and/or compositions of the present invention may be used in a number of different scenarios in which delivery of a substance (the “payload”) to a biological target is desired, for example delivery of detectable substances for detection of the target, or delivery of therapeutic and/or diagnostic agents. Detection methods may include, but are not limited to, both in vitro and in vivo imaging methods, e.g., immunohistochemistry, bioluminescence imaging (BLI), Magnetic Resonance Imaging (MM), positron emission tomography (PET), electron microscopy, X-ray computed tomography, Raman imaging, optical coherence tomography, absorption imaging, thermal imaging, fluorescence reflectance imaging, fluorescence microscopy, fluorescence molecular tomographic imaging, nuclear magnetic resonance imaging, X-ray imaging, ultrasound imaging, photoacoustic imaging, lab assays, or in any situation where tagging/staining/imaging is required.

[0498] In some embodiments, compounds and/or compositions may be designed to include both linkers and payloads in any useful orientation. For example, linkers having two ends may be used to attach one end to the payload and the other end to compounds and/or compositions. Compounds and/or compositions of the present invention may include more than one payload. In some embodiments, compounds and/or compositions may comprise one or more cleavable linker. In some embodiments, payloads may be attached to compounds and/or compositions via a linker and may be fluorescently labeled for in vivo tracking, e.g. intracellularly.

[0499] In some embodiments, compounds and/or compositions of the present invention may be used in reversible drug delivery into cells.

[0500] Compounds and/or compositions of the present invention may be used in intracellular targeting of payloads, e.g., detectable or therapeutic agents, to specific organelles. In addition, compounds and/or compositions of the present invention may be used to deliver therapeutic agents to cells or tissues, e.g., in living animals. For example, the compounds and/or compositions described herein may be used to deliver chemotherapeutic agents to kill cancer cells. Compounds and/or compositions may be attached to therapeutic agents through one or more linkers may facilitate membrane permeation allowing therapeutic agents to travel into cells to reach intracellular targets.

[0501] In some embodiments, payloads may be a therapeutic agent such as a cytotoxins, radioactive ions, chemotherapeutics, or other therapeutic agents. Cytotoxins and/or cytotoxic agents may include any agents that may be detrimental to cells. Examples include, but are not limited to, taxol, cytochalasin B, gramicidin D, ethidium bromide, emetine, mitomycin, etoposide, teniposide, vincristine, vinblastine, colchicine, doxorubicin, daunorubicin, dihydroxyanthracinedione, mitoxantrone, mithramycin, actinomycin D, 1-dehydrotestosterone, glucocorticoids, procaine, tetracaine, lidocaine, propranolol, puromycin, maytansinoids, e.g., maytansinol (see U.S. Pat. No. 5,208,020 incorporated herein in its entirety), rachelmycin (CC-1065, see U.S. Pat. Nos. 5,475,092, 5,585,499, and 5,846,545, the contents of each of which are incorporated herein by reference in their entirety), and analogs or homologs thereof. Radioactive ions include, but are not limited to iodine (e.g., ¹²⁵iodine or ¹³¹iodine), ⁸⁹strontium, phosphorous, palladium, cesium, iridium, phosphate, cobalt, ⁹⁰yttrium, ¹⁵³samarium, and praseodymium. Other therapeutic agents include, but are not limited to, antimetabolites (e.g., methotrexate, 6-mercaptopurine, 6-thioguanine, cytarabine, 5-fluorouracil decarbazine), alkylating agents (e.g., mechlorethamine, thiotepa chlorambucil, rachelmycin (CC-1065), melphalan, carmustine (BSNU), lomustine (CCNU), cyclophosphamide, busulfan, dibromomannitol, streptozotocin, mitomycin C, and cis-dichlorodiamine platinum (II) (DDP) cisplatin), anthracyclines (e.g., daunorubicin (formerly daunomycin) and doxorubicin), antibiotics (e.g., dactinomycin (formerly actinomycin), bleomycin, mithramycin, and anthramycin (AMC)), and anti-mitotic agents (e.g., vincristine, vinblastine, taxol and maytansinoids).

[0502] In some embodiments, payloads may be detectable agents, such as various organic small molecules, inorganic compounds, nanoparticles, enzymes or enzyme substrates, fluorescent materials, luminescent materials (e.g., luminol), bioluminescent materials (e.g., luciferase, luciferin, and aequorin), chemiluminescent materials, radioactive materials (e.g., ¹⁸F, ⁶⁷Ga, ^{81m}Kr, ⁸²Rb, ¹¹¹In, ¹²³I, ¹³³Xe, ²⁰¹Tl, ¹²⁵I, ³⁵S, ¹⁴C, ³H, or ^{99m}Tc (e.g., as pertechnetate (technetate(VII), TcO₄⁻)), and contrast agents (e.g., gold (e.g., gold nanoparticles), gadolinium (e.g., chelated Gd), iron oxides (e.g., superparamagnetic iron oxide (SPIO), monocrystalline iron oxide nanoparticles (MIONs), and ultrasmall superparamagnetic iron oxide (USPIO)), manganese chelates (e.g., Mn-DPDP), barium sulfate, iodinated contrast media (iohexol), microbubbles, or perfluorocarbons). Such optically-detectable labels include for example, without limitation, 4-acetamido-4′-isothiocyanatostilbene-2,2′disulfonic acid; acridine and derivatives (e.g., acridine and acridine isothiocyanate); 5-(2′-aminoethyl)aminonaphthalene-1-sulfonic acid (EDANS); 4-amino-N-[3-vinylsulfonyl)phenyl]naphthalimide-3,5 disulfonate; N-(4-anilino-1-naphthyl)maleimide; anthranilamide; BODIPY; Brilliant Yellow; coumarin and derivatives (e.g., coumarin, 7-amino-4-methylcoumarin (AMC, Coumarin 120), and 7-amino-4-trifluoromethylcoumarin (Coumarin 151)); cyanine dyes; cyanosine; 4′,6-diaminidino-2-phenylindole (DAPI); 5′ 5″-dibromopyrogallol-sulfonaphthalein (Bromopyrogallol Red); 7-diethylamino-3-(4′-isothiocyanatophenyl)-4-methylcoumarin; diethylenetriamine pentaacetate; 4,4′-diisothiocyanatodihydro-stilbene-2,2′-disulfonic acid; 4,4′-diisothiocyanatostilbene-2,2′-disulfonic acid; 5-[dimethylamino]-naphthalene-1-sulfonyl chloride (DNS, dansylchloride); 4-dimethylaminophenylazophenyl-4′-isothiocyanate (DABITC); eosin and derivatives (e.g., eosin and eosin isothiocyanate); erythrosin and derivatives (e.g., erythrosin B and erythrosin isothiocyanate); ethidium; fluorescein and derivatives (e.g., 5-carboxyfluorescein (FAM), dichlorotriazin-2-yl)aminofluorescein (DTAF), 2′,7′-dimethoxy-4′5′-dichloro-6-carboxyfluorescein, fluorescein, fluorescein isothiocyanate, X-rhodamine-5-(and-6)-isothiocyanate (QFITC or XRITC), and fluorescamine); 2-[2-[3-[[1,3-dihydro-1,1-dimethyl-3-(3-sulfopropyl)-2H-benz[e]indol-2-ylidene]ethylidene]-2-[4-(ethoxycarbonyl)-1-piperazinyl]-1-cyclopenten-1-yl]ethenyl]-1,1-dimethyl-3-β-sulforpropyl)-1H-benz[e]indolium hydroxide, inner salt, compound with n,n-diethylethanamine(1:1) (IR144); 5-chloro-2-[2-[3-[(5-chloro-3-ethyl-2(3H)-benzothiazol-ylidene)ethylidene]-2-(diphenylamino)-1-cyclopenten-1-yl]ethenyl]-3-ethyl benzothiazolium perchlorate (IR140); Malachite Green isothiocyanate; 4-methylumbelliferone orthocresolphthalein; nitrotyrosine; pararosaniline; Phenol Red; B-phycoerythrin; o-phthaldialdehyde; pyrene and derivatives (e.g., pyrene, pyrene butyrate, and succinimidyl 1-pyrene); butyrate quantum dots; Reactive Red 4 (CIBACRON™ Brilliant Red 3B-A); rhodamine and derivatives (e.g., 6-carboxy-X-rhodamine (ROX), 6-carboxyrhodamine (R6G), lissamine rhodamine B sulfonyl chloride rhodamine (Rhod), rhodamine B, rhodamine 123, rhodamine X isothiocyanate, sulforhodamine B, sulforhodamine 101, sulfonyl chloride derivative of sulforhodamine 101 (Texas Red), N,N,N′,N letramethyl-6-carboxyrhodamine (TAMRA) tetramethyl rhodamine, and tetramethyl rhodamine isothiocyanate (TRITC)); riboflavin; rosolic acid; terbium chelate derivatives; Cyanine-3 (Cy3); Cyanine-5 (Cy5); cyanine-5.5 (Cy5.5), Cyanine-7 (Cy7); IRD 700; IRD 800; Alexa 647; La Jolta Blue; phthalo cyanine; and naphthalo cyanine.

[0503] In some embodiments, the detectable agent may be a non-detectable precursor that becomes detectable upon activation (e.g., fluorogenic tetrazine-fluorophore constructs (e.g., tetrazine-BODIPY FL, tetrazine-Oregon Green 488, or tetrazine-BODIPY TMR-X) or enzyme activatable fluorogenic agents (e.g., PROSENSE® (VisEn Medical))). In vitro assays in which the enzyme labeled compositions can be used include, but are not limited to, enzyme linked immunosorbent assays (ELISAs), immunoprecipitation assays, immunofluorescence, enzyme immunoassays (EIA), radioimmunoassays (MA), and Western blot analysis.

### Combinations

[0504] In some embodiments, compounds and/or compositions of the present invention may be used in combination with one or more other therapeutic, prophylactic, diagnostic, or imaging agents. By “in combination with,” it is not intended to imply that the agents must be administered at the same time and/or formulated for delivery together, although these methods of delivery are within the scope of the present disclosure. Compounds and/or compositions of the present invention may be administered concurrently with, prior to, or subsequent to, one or more other desired therapeutics or medical procedures. In general, each agent will be administered at a dose and/or on a time schedule determined for that agent. In some embodiments, the present disclosure encompasses the delivery of pharmaceutical, prophylactic, diagnostic, or imaging compositions in combination with agents that may improve their bioavailability, reduce and/or modify their metabolism, inhibit their excretion, and/or modify their distribution within the body.

[0505] In some cases, compounds and/or compositions of the present invention may be combined with one or more therapeutic agents known in the art. Such agents may include BYM338 (Novartis, Basel, Switzerland), wherein administration may comprise any of the methods disclosed in clinical trial number NCT01925209 entitled Efficacy and Safety of Bimagrumab/BYM338 at 52 Weeks on Physical Function, Muscle Strength, Mobility in sIBM Patients (RESILIENT). Other agents that may be used in combination with compounds and/or compositions of the present invention may include any of those disclosed in US Pub. No. 2013/0122007, U.S. Pat. No. 8,415,459 or International Pub. No. WO 2011/151432, the contents of each of which are herein incorporated by reference in their entirety.

### Dosing and Dosage Forms

[0506] The present disclosure encompasses delivery of compounds and/or compositions of the present invention for any of therapeutic, pharmaceutical, diagnostic or imaging by any appropriate route taking into consideration likely advances in the sciences of drug delivery. Delivery may be naked or formulated.

### Naked Delivery

[0507] Compounds and/or compositions of the present invention may be delivered to cells, tissues, organs and/or organisms in naked form. As used herein in, the term “naked” refers to compounds and/or compositions delivered free from agents or modifications which promote transfection or permeability. The naked compounds and/or compositions may be delivered to the cells, tissues, organs and/or organisms using routes of administration known in the art and described herein. In some embodiments, naked delivery may include formulation in a simple buffer such as saline or PBS.

### Formulated Delivery

[0508] In some embodiments, compounds and/or compositions of the present invention may be formulated, using methods described herein. Formulations may comprise compounds and/or compositions which may be modified and/or unmodified. Formulations may further include, but are not limited to, cell penetration agents, pharmaceutically acceptable carriers, delivery agents, bioerodible or biocompatible polymers, solvents, and/or sustained-release delivery depots. Formulations of the present invention may be delivered to cells using routes of administration known in the art and described herein.

[0509] Compositions may also be formulated for direct delivery to organs or tissues in any of several ways in the art including, but not limited to, direct soaking or bathing, via a catheter, by gels, powder, ointments, creams, gels, lotions, and/or drops, by using substrates such as fabric or biodegradable materials coated or impregnated with compositions, and the like.

### Dosing

[0510] The present invention provides methods comprising administering one or more compounds and/or compositions to subjects in need thereof. Compounds and/or compositions of the present invention, or prophylactic compositions thereof, may be administered to subjects using any amount and any route of administration effective for preventing, treating, diagnosing, or imaging diseases, disorders and/or conditions. The exact amount required will vary from subject to subject, depending on species, age and/or general subject condition, severity of disease, particular composition, mode of administration, mode of activity, and the like. Compositions in accordance with the invention are typically formulated in dosage unit form for ease of administration and uniformity of dosage. It will be understood, however, that the total daily usage of compositions of the present invention will be decided by the attending physician within the scope of sound medical judgment. The specific therapeutically effective, prophylactically effective, or appropriate imaging dose level for any particular patient will depend upon a variety of factors including the disorder being treated and the severity of the disorder; the activity of the specific compound employed; the specific composition employed; the age, body weight, general health, sex and diet of the patient; the time of administration, route of administration, and rate of excretion of the specific compound employed; the duration of the treatment; drugs used in combination or coincidental with the specific compound employed; and like factors well known in the medical arts.

[0511] In certain embodiments, compositions in accordance with the present invention may be administered at dosage levels sufficient to deliver from about 0.0001 mg/kg to about 100 mg/kg, from about 0.01 mg/kg to about 50 mg/kg, from about 0.1 mg/kg to about 40 mg/kg, from about 0.5 mg/kg to about 30 mg/kg, from about 0.01 mg/kg to about 10 mg/kg, from about 0.1 mg/kg to about 10 mg/kg, or from about 1 mg/kg to about 25 mg/kg, of subject body weight per day, one or more times a day, to obtain the desired therapeutic, diagnostic, prophylactic, or imaging effect. The desired dosage may be delivered three times a day, two times a day, once a day, every other day, every third day, every week, every two weeks, every three weeks, or every four weeks. In certain embodiments, the desired dosage may be delivered using multiple administrations (e.g., two, three, four, five, six, seven, eight, nine, ten, eleven, twelve, thirteen, fourteen, or more administrations).

[0512] According to the present invention, compounds and/or compositions of the present invention may be administered in split-dose regimens. As used herein, a “split dose” is the division of single unit dose or total daily dose into two or more doses, e.g., two or more administrations of the single unit dose. As used herein, a “single unit dose” is a dose of any therapeutic administered in one dose/at one time/single route/single point of contact, i.e., single administration event. As used herein, a “total daily dose” is an amount given or prescribed in a 24 hour period. In some embodiments, compounds and/or compositions of the present invention may be administered as a single unit dose. In some embodiments, compounds and/or compositions of the present invention may be administered to subjects in split doses. In some embodiments, compounds and/or compositions of the present invention may be formulated in buffer only or in formulations described herein. Pharmaceutical compositions described herein may be formulated into dosage forms described herein, such as a topical, intranasal, intratracheal, or injectable (e.g., intravenous, intraocular, intravitreal, intramuscular, intracardiac, intraperitoneal, subcutaneous). General considerations in the formulation and/or manufacture of pharmaceutical agents may be found, for example, in Remington: The Science and Practice of Pharmacy 21^{st} ed., Lippincott Williams & Wilkins, 2005 (incorporated herein by reference).

### Coatings or Shells

[0513] Solid dosage forms of tablets, dragees, capsules, pills, and granules can be prepared with coatings and shells such as enteric coatings and other coatings well known in the pharmaceutical formulating art. They may optionally comprise opacifying agents and can be of a composition that they release the active ingredient(s) only, or preferentially, in a certain part of the intestinal tract, optionally, in a delayed manner. Examples of embedding compositions which can be used include polymeric substances and waxes. Solid compositions of a similar type may be employed as fillers in soft and hard-filled gelatin capsules using such excipients as lactose and/or milk sugar as well as high molecular weight polyethylene glycols and the like.

### Assays

[0514] In some embodiments, recombinant proteins (including, but not limited to chimeric proteins) disclosed herein and/or antibodies directed to such proteins may be developed using assays described herein. In some embodiments, recombinant proteins (including, but not limited to chimeric proteins) disclosed herein and/or antibodies directed to such proteins may be used in assays to develop other recombinant proteins and/or antibodies of the present invention.

### Binding Assays

[0515] In some embodiments, the present invention provides binding assays. As used herein, the term “binding assay” refers to an assay used to assess the ability of two or more factors to associate. Such assays may assess the ability of a desired antigen to bind a desired antibody and then use one or more detection methods to detect binding. Binding assays of the invention may include, but are not limited to surface Plasmon resonance-based assays, ELISAs and fluorescence flow cytometry-based assays. Binding assays of the invention may comprise the use of one or more recombinant proteins described herein, including, but not limited to any TGF-β family member proteins, any chimeric proteins, any cofactors and any modules, combinations or fragments thereof.

### Cell-Based Assays

[0516] In some embodiments, the present invention provides cell-based assays. As used herein, the term “cell-based assay” refers to an assay comprising at least one aspect that involves the use of a living cell or cell culture. In some embodiments, these may be useful for assessing the modulation of growth factor release from GPCs, referred to herein as “growth factor release assays”. In some embodiments, cell-based assays may be useful for assessing the modulation of growth factor activity, referred to herein as “growth factor activity assays”. Cell-based assays of the present invention may comprise expression cells and/or responsive cells. Expression cells, as referred to herein, are cells that express one or more factors being analyzed in a particular assay. Such expression may be natural or may be the result of transfection and/or transduction of a foreign gene. In some embodiments, expression of one or more factors by expression cells may be enhanced or suppressed by the addition of one or more exogenous factors. In some embodiments, expression cells may comprise cell lines (e.g. HEK293 cells, CHO cells, TMLC cells, 293T/17 cells, Hs68 cells, CCD1112sk cells, HFF-1 cells, Keloid fibroblasts or Sw-480 cells). In some embodiments, cell lines comprising expression cells may express one or more recombinant proteins of the present invention (e.g. naturally and/or through transfection, stable transfection, and/or transduction).

[0517] In some embodiments, growth factor release/activity assays may comprise expression cells that express GPCs. In such embodiments, additional factors may be co-expressed in and/or combined with expression cells to determine their effect on growth factor release from such GPCs. In some embodiments, integrins (including, but not limited to αᵥβ₆ integrin, αᵥβ₈ integrin and/or α₉β₁ integrin) are co-expressed and/or otherwise introduced to GPC-expressing expression cells. In some embodiments, such additional integrin expression may facilitate growth factor release. In some embodiments, LTBPs, fibrillins and/or GARPs and/or variants thereof are coexpressed and/or otherwise introduced into expression cells.

[0518] In some embodiments, one or more genes may be knocked out, knocked down and/or otherwise modulated in expression cells depending on the focus of a particular assay. In some embodiments, one or more gene products may be modulated at the RNA and/or protein level. In some embodiments, gene products may be reduced through the introduction of siRNA molecules to expression cells. In some embodiments, gene products from LTBP, fibrillin and/or GARP genes may be reduced and/or eliminated from expression cells of the present invention.

[0519] Cell-based assays of the present invention, including, but not limited to growth factor release/activity assays, may comprise responsive cells. As used herein, the term “responsive cell” refers to a cell that undergoes a response to one or more factors introduced into an assay. In some embodiments, such responses may include a change in gene expression, wherein such cells modulate transcription of one or more genes upon contact with one or more factors introduced. In some embodiments, responsive cells may undergo a change in phenotype, behavior and/or viability.

[0520] In some embodiments, responsive cells comprise one or more reporter genes. As used herein, the term “reporter gene” refers to a synthetic gene typically comprising a promoter and a protein coding region encoding one or more detectable gene products. Reporter genes are typically designed in a way such that their expression may be modulated in response to one or more factors being analyzed by a particular assay. This may be carried out by manipulating the promoter of reporter genes. As used herein, the term promoter refers to part of a gene that initiates transcription of that gene. Promoters typically comprise nucleotides at the 3′ end of the antisense strand of a given gene and are not transcribed during gene expression. Promoters typically function through interaction with one or more transcription factors as well as RNA polymerase enzymes to initiate transcription of the protein encoding portion of the gene. Segments of the promoter that physically interact with one or more transcription factors and/or polymerase enzymes are referred to herein as response elements. In some embodiments, reporter genes are designed to comprise promoters and/or response elements known to be responsive to one or more factors (including, but not limited to growth factors) being analyzed in a given assay. Changes in responsive cell gene expression may be measured according to any methods available in the art to yield gene expression data. Such gene expression data may be obtained in the form of luciferase activity data [often measured in terms of relative light units (RLUs)].

[0521] In some cases, responsive cells undergo a change in viability in response to one or more factors introduced in an assay. Such responsive cells may be used in proliferation assays as described herein. Changes in responsive cell viability may be detected by cell counting and/or other methods known to those skilled the art to yield responsive cell viability data.

[0522] Protein encoding regions of reporter genes typically encode one or more detectable proteins. Detectable proteins refer to any proteins capable of detection through one or more methods known in the art. Such detection methods may include, but are not limited to Western blotting, ELISA, assaying for enzymatic activity of detectable proteins (e.g. catalase activity, β-galactosidase activity and/or luciferase activity), immunocytochemical detection, surface plasmon resonance detection and/or detection of fluorescent detectable proteins. When a reporter gene is used in an assay, the expression of detectable proteins correlates with the ability of factors being assayed to activate the promoter present in the reporter gene. In embodiments comprising growth factor release/activity assays, reporter gene promoters typically respond to growth factor signaling. In such embodiments, the level of detectable protein produced correlates with level of growth factor signaling, indicating release and/or activity of a given growth factor.

[0523] In some embodiments, reporter genes encode luciferase enzymes. Chemical reactions between luciferase enzymes and substrate molecules are light-emitting reactions. Due to such light-emitting reactions, luciferase enzyme levels can be quantified through the addition of substrate molecules and subsequent photodetection of the emitted light. In some embodiments, reporter genes of the present invention encode firefly luciferase, the sequence of which was cloned from Photinus pyralis. In some embodiments, responsive cells of the present invention comprise reporter genes that express luciferase with promoters that are responsive to growth factors. In such embodiments, luciferase activity may correlate with growth factor activity levels allowing for growth factor activity and/or release from GPCs to be determined.

[0524] In some embodiments, reporter genes are inserted into bacterial plasmids to enable replication and/or facilitate introduction into cells. In some embodiments, such plasmids are designed to comprise sequences encoding detectable gene products and may be manipulated to insert promoter sequences that may be responsive to one or more factors of interest. These plasmids are referred to herein as reporter plasmids. In some embodiments of the present invention, promoters that may be responsive to one or more factors of interest may be inserted into reporter plasmids, upstream of sequences encoding detectable gene products to form functional reporter genes within such reporter plasmids. Reporter plasmids that comprise at least one functional reporter gene are referred to herein as reporter constructs. In some embodiments, reporter constructs of the present invention may comprise pGL2 reporter plasmids (Promega BioSciences, LLC, Madison, Wis.), pGL3 reporter plasmids (Promega BioSciences, LLC, Madison, Wis.), pGL4 reporter plasmids (Promega BioSciences, LLC, Madison, Wis.) or variants thereof. Such reporter constructs express firefly luciferase in response to promoter activation.

[0525] In some embodiments, reporter constructs may be introduced directly into expression cells or may be introduced into one or more responsive cells. Responsive cells of the present invention comprising one or more reporter genes are referred to herein as reporter cells. In some embodiments, reporter cells may be transiently transfected with reporter constructs or may comprise stable expression of such constructs (e.g. reporter constructs are successfully replicated along with genomic DNA during each round of cell division). Cell lines that stably comprise reporter constructs are referred to herein as reporter cell lines. In some embodiments, reporter cells are mammalian. In some embodiments, reporter cells may comprise mouse cells, rabbit cells, rat cells, monkey cells, hamster cells and human cells. In some embodiments, cell lines useful for transient and/or stable expression of reporter genes may include, but are not limited to HEK293 cells, HeLa cells, Sw-480 cells, TMLC cells [as disclosed by Abe et al (Abe, M. et al., An assay for transforming growth factor-β using cells transfected with a plasminogen activator inhibitor-1 promoter-luciferase construct. Analytical Biochemistry. 1994. 216:276-84)], 293T/17 cells, Hs68 cells, CCD1112sk cells, HFF-1 cells, Keloid fibroblasts, A204 cells, L17 RIB cells [as disclosed by Cash et al (Cash, J. N et al., The structure of myostatin:follistatin 288: insights into receptor utilization and heparin binding. The EMBO Journal. 2009. 28:2662-76)], C₂C₁₂ cells and EL4 T lymphoma cells.

[0526] In embodiments where one or more reporter cells and/or reporter cell lines are utilized, such cells may be cultured with expression cells as part of a co-culture system. In some embodiments reporter cells/reporter cell lines may be cultured separately from expression cells. In such embodiments, lysates and/or media from expression cells may be combined with reporter cell/reporter cell line cultures to assess expressed factors (including, but not limited to growth factors).

[0527] In some embodiments, cell-based assays of the present invention may only comprise expression cells and not responsive cells. In such embodiments, expressed proteins, including but not limited to GPCs and/or growth factors, may be detected by one or more methods that are not cell based. Such methods may include, but are not limited to Western Blotting, enzyme-linked immunosorbent assay (ELISA), immunocytochemistry, surface plasmon resonance and other methods known in the art for protein detection. In some embodiments, TGF-β release in expression cell cultures and/or culture medium may be detected by ELISA. In some embodiments, such assays may utilize anti-TGF-β antibody, clone 1D11 antibody (R&D Systems, Minneapolis, Minn.) as a capture antibody, capable of recognizing TGF-β isoforms 1, 2 and 3 in multiple species, including, but not limited to cows, chickens, mice and humans. In some embodiments, biotinylated anti-TGF-β1 chicken IgY (BAF240; R&D Systems, Minneapolis, Minn.) may be used as a detection antibody. In some embodiments, GDF-8/myostatin release in expression cell cultures and/or culture medium may be detected by ELISA. In some embodiments, the GDF-8/myostatin quantikine ELISA kit (R&D Systems, Minneapolis, Minn.) may be used. Examples of anti-GDF-8/myostatin antibodies that may be used for detection include AF1539, MAB788 and AF788 (R&D Systems, Minneapolis, Minn.).

[0528] In some embodiments, reporter genes of the present invention comprise growth factor-responsive promoters. As used herein, the term “growth factor-responsive promoter” refers to a gene promoter that facilitates transcription of a downstream gene in response to growth factor cell signaling induced by one or more growth factors. In some embodiments, growth factor-responsive promoters are responsive to TGF-β family member growth factor signaling. In some embodiments, growth factor-responsive promoters of the present invention comprise one or more sequences listed in Table 19 or fragments or variants thereof. These include two versions of the plasminogen activator inhibitor type 1 (PAI-1) promoter [V1 as disclosed by Abe et al (Abe, M. et al., An assay for transforming growth factor-β using cells transfected with a plasminogen activator inhibitor-1 promoter-luciferase construct. Analytical Biochemistry. 1994. 216:276-84) and V2 as disclosed in WO 2011/034935, the contents of which are hereby incorporated by reference in their entirety,] a collagen, type 1, alpha 1 promoter, a collagen, type 1, alpha 2 promoter, a FoxP3 promoter, a CAGA12 promoter [responsive to Smad-dependent signaling as reported by Thies et al (Thies, R. S. et al., GDF-8 propeptide binds to GDF-8 and antagonizes biological activity by inhibiting GDF-8 receptor binding. Growth Factors. 2001. 18:251-9) and an adenovirus major late promoter.

TABLE 19
Growth factor-responsive promoters

| | | SEQ |
|---|---|---|
| | | ID |
| Promoter | Sequence | NO |
| PAI-1 (V1) | AGCTTACCATGGTAACCCCTGGTCCCGTTCAGCCACCACCACCC | 333 |
| | CACCCAGCACACCTCCAACCTCAGCCAGACAAGGTTGTTGACA | |
| | CAAGAGAGCCCTCAGGGGCACAGAGAGAGTCTGGACACGTGG | |
| | GGAGTCAGCCGTGTATCATCGGAGGCGGCCGGGCACATGGCAG | |
| | GGATGAGGGAAAGACCAAGAGTCCTCTGTTGGGCCCAAGTCCT | |
| | AGACAGACAAAACCTAGACAATCACGTGGCTGGCTGCATGCCT | |
| | GTGGCTGTTGGGCTGGGCAGGAGGAGGGAGGGGCGCTCTTTCC | |
| | TGGAGGTGGTCCAGAGCACCGGGTGGACAGCCCTGGGGGAAA | |
| | ACTTCCACGTTTTGATGGAGGTTATCTTTGATAACTCCACAGTG | |
| | ACCTGGTTCGCCAAAGGAAAAGCAGGCAACGTGAGCTGTTTTT | |
| | TTTTTCTCCAAGCTGAACACTAGGGGTCCTAGGCTTTTTGGGTC | |
| | ACCCGGCATGGCAGACAGTCAACCTGGCAGGACATCCGGGAG | |
| | AGACAGACACAGGCAGAGGGCAGAAAGGTCAAGGGAGGTTCT | |
| | CAGGCCAAGGCTATTGGGGTTTGCTCAATTGTTCCTGAATGCTC | |
| | TTACACACGTACACACACAGAGCAGCACACACACACACACACA | |
| | CATGCCTCAGCAAGTCCCAGAGAGGGAGGTGTCGAGGGGGAC | |
| | CCGCTGGCTGTTCAGACGGACTCCCAGAGCCAGTGAGTGGGTG | |
| | GGGCTGGAACATGAGTTCATCTATTTCCTGCCCACATCTGGTAT | |
| | AAAAGGAGGCAGTGGCCCACAGAGGAGCACAGCTGTGTTTGG | |
| | CTGCAGGGCCAAGAGCGCTGTCAAGAAGACCCACACGCCCCCC | |
| | TCCAGCAGCTG | |
| PAI-1 (V2) | TTGGTCTCCTGTTTCCTTACCAAGCTTTTACCATGGTAACCCCTG | 334 |
| | GTCCCGTTCAGCCACCACCACCCCACCCAGCACACCTCCAACCT | |
| | CAGCCAGACAAGGTTGTTGACACAAGAGAGCCCTCAGGGGCAC | |
| | AGAGAGAGTCTGGACACGTGGGGAGTCAGCCGTGTATCATCGG | |
| | AGGCGGCCGGGCACATGGCAGGGATGAGGGAAAGACCAAGAG | |
| | TCCTCTGTTGGGCCCAAGTCCTAGACAGACAAAACCTAGACAA | |
| | TCACGTGGCTGGCTGCATGCCCTGTGGCTGTTGGGCTGGGCCCA | |
| | GGAGGAGGGAGGGGCGCTCTTTCCTGGAGGTGGTCCAGAGCAC | |
| | CGGGTGGACAGCCCTGGGGGAAAACTTCCACGTTTTGATGGAG | |
| | GTTATCTTTGATAACTCCACAGTGACCTGGTTCGCCAAAGGAA | |
| | AAGCAGGCAACGTGAGCTGTTTTTTTTTTCTCCAAGCTGAACAC | |
| | TAGGGGTCCTAGGCTTTTTGGGTCACCCGGCATGGCAGACAGT | |
| | CAACCTGGCAGGACATCCGGGAGAGACAGACACAGGCAGAGG | |
| | GCAGAAAGGTCAAGGGAGGTTCTCAGGCCAAGGCTATTGGGGT | |
| | TTGCTCAATTGTTCCTGAATGCTCTTACACACGTACACACACAG | |
| | AGCAGCACACACACACACACACACATGCCTCAGCAAGTCCCAG | |
| | AGAGGGAGGTGTCGAGGGGGACCCGCTGGCTGTTCAGACGGA | |
| | CTCCCAGAGCCAGTGAGTGGGTGGGGCTGGAACATGAGTTCAT | |
| | CTATTTCCTGCCCACATCTGGTATAAAAGGAGGCAGTGGCCCA | |
| | CAGAGGAGCACAGCTGTGTTTGGCTGCAGGGCCAAGAGCGCTG | |
| | TCAAGAAGACCCACACGCCCCCCTCCAGCAGCTGAATTCCTGC | |
| | AGCTCAGCAGCCGCCGCCAGAGCAGGACGAACCGCCAATCGC | |
| | AAGGCACCTCTGAGAACTTCAGGTA | |
| Col1A1 | CCATGGCAAACAAAACTCTTCTCTAAGTCACCAATGATCACAG | 335 |
| | GCCTCCCACTAAAAATACTTCCCAACTCTGGGGTGGAAGAGTT | |
| | TGGGGGATGAATTTTTAGGGGATTGCAAGCCCCAATCCCCACC | |
| | TCTGTGTCCCTAGAATCCCCCACCCCTACCTTGGCTGCTCCATC | |
| | ACCCAACCACCAAAGCTTTCTTCTGCAGAGGCCACCTAGTCAT | |
| | GTTTCTCACCCTGCACCTCAGCCTCCCCACTCCATCTCTCAATC | |
| | ATGCCTAGGGTTTGGAGGAAGGCATTTGATTCTGTTCTGGAGCA | |
| | CAGCAGAAGAATTGACATCCTCAAAATTAAAACTCCCTTGCCT | |
| | GCACCCCTCCCTCAGATATCTGATTCTTAATGTCTAGAAAGGAA | |
| | TCTGTAAATTGTTCCCCAAATATTCCTAAGCTCCATCCCCTAGC | |
| | CACACCAGAAGACACCCCCAAACAGGCACATCTTTTTAATTCC | |
| | CAGCTTCCTCTGTTTTGGAGAGGTCCTCAGCATGCCTCTTTATG | |
| | CCCCTCCCTTAGCTCTTGCCAGGATATCAGAGGGTGACTGGGG | |
| | CACAGCCAGGAGGACCCCCTCCCCAACACCCCCAACCCTTCCA | |
| | CCTTTGGAAGTCTCCCCACCCAGCTCCCCAGTTCCCCAGTTCCA | |
| | CTTCTTCTAGATTGGAGGTCCCAGGAAGAGAGCAGAGGGGCAC | |
| | CCCTACCCACTGGTTAGCCCACGCCATTCTGAGGACCCAGCTGC | |
| | ACCCCTACCACAGCACCTCTGGCCCAGGCTGGGCTGGGGGGCT | |
| | GGGGAGGCAGAGCTGCGAAGAGGGGAGATGTGGGGTGGACTC | |
| | CCTTCCCTCCTCCTCCCCCTCTCCATTCCAACTCCCAAATTGGG | |
| | GGCCGGGCCAGGCAGCTCTGATTGGCTGGGGCACGGGCGGCCG | |
| | GCTCCCCCTCTCCGAGGGGCAGGGTTCCTCCCTGCTCTCCATCA | |
| | GGACAGTATAAAAGGGGCCCGGGCCAGTCGTCGGAGCAGACG | |
| | GGAGTTTCTCCTCGGGGTCGGAGCAGGAGGCACGCGGAGTGTG | |
| | AGGCCACGCATGAGCGGACGCTAACCCCCTCCCCAGCCACAAA | |
| | GAGTCTACATG | |
| Col1A2 | TAGAGTTCGCAAAGCCTATCCTCCCTGTAGCCGGGTGCCAAGC | 336 |
| | AGCCTCGAGCCTGCTCCCCAGCCCACCTGCCAACAAAAGGCGC | |
| | CCTCCGACTGCAACCCAGCCCTCCACAGACAGGACCCGCCCTT | |
| | TCCCGAAGTCATAAGACAAAGAGAGTGCATCACTGCTGAAACA | |
| | GTGGGCGCACACGAGCCCCAAAGCTAGAGAAAAGCTGGACGG | |
| | GGCTGGGGGCGGGGTGCAGGGGTGGAGGGGCGGGGAGGCGGG | |
| | CTCCGGCTGCGCCACGCTATCGAGTCTTCCCTCCCTCCTTCTCT | |
| | GCCCCCTCCGCTCCCGCTGGAGCCCTCCACCCTACAAGTGGCCT | |
| | ACAGGGCACAGGTGAGGCGGGACTGGACAGCTCCTGCTTTGAT | |
| | CGCCGGAGATCTGCAAATTCTGCCCATGTCGGGGCTGCAGAGC | |
| | ACTCCGACGTGTCCCATAGTGTTTCCAAACTTGGAAAGGGCGG | |
| | GGGAGGGCGGGAGGATGCGGAGGGCGGAGGTATGCAGACAAC | |
| | GAGTCAGAGTTTCCCCTTGAAAGCCTCAAAAGTGTCCACGTCCT | |
| | CAAAAAGAATGGAACCAATTTAAGAAGCCAGCCCCGTGGCCAC | |
| | GTCCCTTCCCCCATTCGCTCCCTCCTCTGCGCCCCCGCAGGCTC | |
| | CTCCCAGCTGTGGCTGCCCGGGCCCCCAGCCCCAGCCCTCCCAT | |
| | TGGTGGAGGCCCTTTTGGAGGCACCCTAGGGCCAGGGAAACTT | |
| | TTGCCGTATAAATAGGGCAGATCCGGGCTTTATTATTTTAGCAC | |
| | CACGGCAGCAGGAGGTTTCGGCTAAGTTGGAGGTACTGGCCAC | |
| | GACTGCATGCCCGCGCCCGCCAGGTGATACCTCCGCCGGTGAC | |
| | CCAGGGGCTCTGCGACACAAGGAGTCTGCATGTCTAAGTGCTA | |
| | GACATGCTCAGCTTTGTGGATACGCGGACTTTGTTGCTGCTTGC | |
| | AGTAA | |
| FoxP3 | AGTAAAAGACCCCAAAGGCTGAGGGCCTCAGAAGCATCAGGC | 337 |
| | CATGATGTTCCTGAAACAAGAGGGTCAGGGTCCCAATGGGCCT | |
| | CTGGGGTTCATCGTGAGGATGGATGCATTAATATTGGGGACCT | |
| | GCTAGGGACCTTCCCAGTGGGACAGTGGCTGGGTCAGGGCACT | |
| | CAAGCCCTAAAACGTGATGAGGCGAGACTTTTCTCTCTTTCCTC | |
| | ATTCAGTAACTGTCAGTAGATTCTGGGAGCCAGGGATTCTCCG | |
| | ACTCTTCAAGTCCATGAATTTTAGGGGATGACAGTGGGCTCTCC | |
| | GCTTTCTCCTCCATGAAGTAACTTACATGCCCCTCACCCTCTGT | |
| | GGGAGGGGTGTTGCAGGGGGTGCAGAACTCCCCTCGCCGGGTA | |
| | GTTCAAGCAATGGGGACCATATCAATTCCATCTATAGGGAAAC | |
| | TGAGGCCTGGAGTAGGGCGAGGCCTCTGGGAACCCAGCCCTAT | |
| | TCTGTCTCTTTCCCTGGCATTTCCCATCCACACATAGAGCTTCA | |
| | GATTCTCTTTCTTTCCCCAGAGACCCTCAAATATCCTCTCACTC | |
| | ACAGAATGGTGTCTCTGCCTGCCTCGGGTTGGCCCTGTGATTTA | |
| | TTTTAGTTCTTTTCCCTTGTTTTTTTTTTTTCAAACTCTATACACT | |
| | TTTGTTTTAAAAACTGTGGTTTCTCATGAGCCCTATTATCTCATT | |
| | GATACCTCTCACCTCTGTGGTGAGGGGAAGAAATCATATTTTCA | |
| | GATGACTCGTAAAGGGCAAAGAAAAAAACCCAAAATTTCAAA | |
| | ATTTCCGTTTAAGTCTCATAATCAAGAAAAGGAGAAACACAGA | |
| | GAGAGAGAAAAAAAAAACTATGAGAACCCCCCCCCACCCCGT | |
| | GATTATCAGCGCACACACTCATCGAAAAAAATTTGGATTATTA | |
| | GAAGAGAGAGGTCTGCGGCTTCCACACCGTACAGCGTGGTTTT | |
| | TCTTCTCGGTATAAAAGCAAAGTTGTTTTTGATACGTGACAGTT | |
| | TCCCACAAGCCAGGCTGATCCTTTTCTGTCAGTCCACTTCACCA | |
| CAGA12 | AGCCAGACAAGCCAGACAAGCCAGACAAGCCAGACAAGCCAG | 338 |
| | ACAAGCCAGACAAGCCAGACAAGCCAGACAAGCCAGACAAGC | |
| | CAGACAAGCCAGACAAGCCAGACA | |
| Adenovirus | GGGCTATAAAAGGGGGTGGGGGCGCGTTCGTCCTCACTCTCTT | 339 |
| major late | CCG | |
| promoter | | |

[0529] In some embodiments, mink lung epithelial/PAI reporter cell lines may be used. Mink lung epithelial cells do not produce TGF-β, but do express high levels of TGF-β receptors (Munger et al). Mink lung epithelial/PAI reporter cell lines comprise reporter constructs comprising promoter elements from the TGF-β-responsive genes PAI and/or COL1A that modulate the expression of the protein coding portion of the luciferase gene. In some embodiments, other reporter constructs may be used with mink lung epithelial cells. In some embodiments, SMAD3-responsive reporter constructs may be used.

[0530] CAGA promoter-based reporter assays may be used to test antibodies that modulate SMAD-dependent gene expression as reported by Thies et al (Thies, R. S. et al., Growth Factors. 2001. 18:251-9, the contents of which are herein incorporated by reference in their entirety).

### TGF-β2 Release Assay

[0531] In some embodiments, the present invention provides assays for detecting the release and/or activity of TGF-β2. Such assays may comprise cell lines (e.g. HEK293 cells, 293T/17 cells, Hs68 cells, CCD1112sk cells, HFF-1 cells, Keloid fibroblasts or Sw-480 cells) that express GPCs comprising TGF-β2 (e.g. naturally and/or through transfection, stable transfection, and/or transduction) and/or recombinant and/or chimeric protein derivatives thereof. In some embodiments, additional factors are expressed in and/or combined with TGF-β2-expressing cells to determine their effect on TGF-β2 growth factor release. In some embodiments, integrins may be expressed. In some embodiments, α₉β₁ integrin may be expressed.

[0532] In some embodiments, TGF-β2 release may be detected by one or more growth factor release assays according to those described herein. In some embodiments, such assays may comprise the use of mink lung epithelial/PAI reporter cell lines to measure TGF-β2 release and/or activity. In some embodiments, TGF-β2 release assays may be used to screen antibodies for inhibitory and/or activating properties with regard to TGF-β2 release from GPCs and/or activity

### T_{reg} Induction Assay

[0533] T_{reg} cells are immune cells that comprise a suppressor cell function important in regulating autoimmunity. Such cells are derived from precursor cells after the induction of the FoxP3 gene (Wood and Sakaguchi, Nature Reviews, 2003). FoxP3 is a transcription factor, the expression of which may be regulated to some degree by TGF-β-related proteins. Wan and Flavell (2005) demonstrated that in response to exogenous TGF-β, activated primary T cells show de novo FoxP3 and “knocked-in” fluorescent protein expression and induction of suppressor cell function. Tone et al (2008) demonstrated that key TGF-β responsive enhancer elements that drive FoxP3 expression in primary T cells are present in the EL4 T lymphoma line. In some embodiments, the present invention provides reporter constructs comprising promoter elements from the FoxP3 gene that modulate expression of such reporter constructs (referred to herein as FoxP3-driven reporter constructs). In some embodiments, FoxP3-driven reporter constructs comprise promoter elements responsive to TGF-β-related protein cell signaling activity. In some embodiments, FoxP3-driven reporter constructs are introduced (transiently and/or stably) to one or more cells and/or cell lines. Such cells are referred to herein as FoxP3-driven reporter cells. In some embodiments, such cells are mammalian. In some embodiments, such mammalian cells may include, but are not limited to mouse cells, rabbit cells, rat cells, monkey cells, hamster cells and human cells. Such cells may be derived from a cell line. In some embodiments, human cells may be used. In some embodiments, cell lines may include, but are not limited to HEK293 cells, HeLa cells, Sw-480 cells, EL4 T lymphoma cells, TMLC cells, 293T/17 cells, Hs68 cells, CCD1112sk cells, HFF-1 cells, Keloid fibroblasts, A204 cells, L17 RIB cells and C₂C₁₂ cells. In some embodiments, EL4 T lymphoma cells may be used. EL4 T lymphoma cells are known to comprise transcriptional enhancer elements that are responsive to TGF-β-related protein signaling. In some embodiments, FoxP3-driven reporter cells may be used to screen antibodies for their ability to activate and/or inhibit FoxP3-dependent gene expression.

[0534] In some cases, antibodies capable of modulating TGF-β release are also tested for their ability to convert CD4+CD25− precursor cells to induced regulatory T cells (iTreg cells) by upregulating FoxP3. Cells expressing GPCs (alone or in complex with GARP or LTBP proteins) are incubated with selected antibodies and analyzed for iTreg induction and/or the treated cells (or resulting supernatants) are used in Treg suppression assays (that measure CD4+CD25− cell division in the presence or absence of iTreg cells).

[0535] Additional T cell assays may include any of those known in the art or may include methods derived from T cell assays known in the art (see Fantini, M. C. et al., 2007. Nature Protocols. 2(7):1789-94; Collison, L. W. et al., 2011. Methods Mol Biol. 707:21-37 and Kruisbeek, A. M. et al., 2004. Cur Prot Immunol. 3.12.1-3.12.20, the contents of each of which are herein incorporated by reference in their entirety).

### Proliferation/Differentiation Assays

[0536] In some embodiments, cell-based assays of the present invention may comprise proliferation assays. As used herein, the term “proliferation assay” refers to an assay that determines the effect on one or more agents on cell proliferation.

[0537] In some cases, proliferation assays may comprise HT2 proliferation assays. Such assays may be carried out, for example, according to the methods described in Tsang, M. et al., 1995. Cytokine 7(5):389-97, the contents of which are herein incorporated by reference in their entirety. HT2 cells (ATCC CRL-1841) are grown in the presence of IL-2, in which they are insensitive to TGF-β1 in the culture media. When HT2 cells are switched into IL-4-containing media they will continue to proliferate, but will respond to TGF-β1 in the culture media by induction of apoptosis. In IL-4 containing media, cell death due to TGF-β1 in culture media occurs in a dose dependent manner, which can be blocked by numerous reagents interfering with the TGF-β signaling pathway. This enables the use of this assay to screen reagents to modulate TGF-β1 activation.

[0538] Detection of changes in cell number may be carried out, in some embodiments, through the detection and/or quantification of ATP levels in cells. ATP levels typically correlate with the number of cells present in a given test sample, well, plate or dish. In some embodiments, ATP levels may be determined using a CELLTITER-GLO® Luminescent Cell Viability Assay (Promega BioSciences, LLC, Madison, Wis.).

[0539] Cell-based assays used to develop and test compounds of the invention may include assays used to look for effects on epithelial to mesenchymal transition (EMT) referred to herein as “EMT assays”. Such assays may include those described in Kasai, H. et al., 2005. Respiratory Research. 6:56 or Xi, Y. et al., 2014. Am J Respir Cell Mol Biol. 50(1): 51-60, the contents of each of which are herein incorporated by reference in their entirety. EMT assays may utilize human type II alveolar epithelial (A549) cells. These cells may be treated with proTGF-β1 in the presence or absence of compounds and/or compositions of the invention to determine the effect on EMT. EMT in assay cells may be assessed by analysis of gene and/or protein expression or by microscopy to assess morphological alterations and/or changes in expression of cell surface proteins.

[0540] In some embodiments, cell differentiation assays may be used to assess growth factor activity modulation by activating and/or inhibiting antibodies. Cell differentiation assays may include skeletal muscle differentiation assays. In some cases, skeletal muscle differentiation assays assess myoblast differentiation by looking at changes in the expression level of proteins that change during stages of differentiation. Such proteins may include, but are not limited to myogenin, myosin heavy chain and creatine kinase.

### Kits and Devices

[0541] Any of the compounds and/or compositions of the present invention may be comprised in a kit. In a non-limiting example, reagents for generating compounds and/or compositions, including antigen molecules are included in one or more kit. In some embodiments, kits may further include reagents and/or instructions for creating and/or synthesizing compounds and/or compositions of the present invention. In some embodiments, kits may also include one or more buffers. In some embodiments, kits of the invention may include components for making protein or nucleic acid arrays or libraries and thus, may include, for example, solid supports.

[0542] In some embodiments, kit components may be packaged either in aqueous media or in lyophilized form. The container means of the kits will generally include at least one vial, test tube, flask, bottle, syringe or other container means, into which a component may be placed, and preferably, suitably aliquotted. Where there are more than one kit component, (labeling reagent and label may be packaged together), kits may also generally contain second, third or other additional containers into which additional components may be separately placed. In some embodiments, kits may also comprise second container means for containing sterile, pharmaceutically acceptable buffers and/or other diluents. In some embodiments, various combinations of components may be comprised in one or more vial. Kits of the present invention may also typically include means for containing compounds and/or compositions of the present invention, e.g., proteins, nucleic acids, and any other reagent containers in close confinement for commercial sale. Such containers may include injection or blow-molded plastic containers into which desired vials are retained.

[0543] In some embodiments, kit components are provided in one and/or more liquid solutions. In some embodiments, liquid solutions are aqueous solutions, with sterile aqueous solutions being particularly preferred. In some embodiments, kit components may be provided as dried powder(s). When reagents and/or components are provided as dry powders, such powders may be reconstituted by the addition of suitable volumes of solvent. In some embodiments, it is envisioned that solvents may also be provided in another container means. In some embodiments, labeling dyes are provided as dried powders. In some embodiments, it is contemplated that 10, 20, 30, 40, 50, 60, 70, 80, 90, 100, 120, 120, 130, 140, 150, 160, 170, 180, 190, 200, 300, 400, 500, 600, 700, 800, 900, 1000 micrograms or at least or at most those amounts of dried dye are provided in kits of the invention. In such embodiments, dye may then be resuspended in any suitable solvent, such as DMSO.

[0544] In some embodiments, kits may include instructions for employing kit components as well the use of any other reagent not included in the kit. Instructions may include variations that may be implemented.

[0545] In some embodiments, compounds and/or compositions of the present invention may be combined with, coated onto or embedded in a device. Devices may include, but are not limited to, dental implants, stents, bone replacements, artificial joints, valves, pacemakers and/or other implantable therapeutic device.

### DEFINITIONS

[0546] At various places in the present specification, substituents of compounds of the present disclosure are disclosed in groups or in ranges. It is specifically intended that the present disclosure include each and every individual subcombination of the members of such groups and ranges. The following is a non-limiting list of term definitions.

[0547] Activity: As used herein, the term “activity” refers to the condition in which things are happening or being done. Compositions of the invention may have activity and this activity may involve one or more biological events. In some embodiments, such biological event may involve growth factors and/or growth factor signaling. In some embodiments, biological events may include cell signaling events associated with growth factor and receptor interactions. In some embodiments, biological events may include cell signaling events associated with TGF-β or TGF-β-related protein interactions with one or more corresponding receptors.

[0548] Administered in combination: As used herein, the term “administered in combination” or “combined administration” refers to simultaneous exposure of one or more subjects to two or more agents administered at the same time or within an interval such that the subject is at some point in time simultaneously exposed to both and/or such that there may be an overlap in the effect of each agent on the patient. In some embodiments, at least one dose of one or more agents is administered within about 24 hours, 12 hours, 6 hours, 3 hours, 1 hour, 30 minutes, 15 minutes, 10 minutes, 5 minutes, or 1 minute of at least one dose of one or more other agents. In some embodiments, administration occurs in overlapping dosage regimens. As used herein, the term “dosage regimen” refers to a plurality of doses spaced apart in time. Such doses may occur at regular intervals or may include one or more hiatus in administration. In some embodiments, the administration of individual doses of one or more compounds and/or compositions of the present invention, as described herein, are spaced sufficiently closely together such that a combinatorial (e.g., a synergistic) effect is achieved.

[0549] Animal: As used herein, the term “animal” refers to any member of the animal kingdom. In some embodiments, “animal” refers to humans at any stage of development. In some embodiments, “animal” refers to non-human animals at any stage of development. In certain embodiments, the non-human animal is a mammal (e.g., a rodent, a mouse, a rat, a rabbit, a monkey, a dog, a cat, a sheep, cattle, a primate, or a pig). In some embodiments, animals include, but are not limited to, mammals, birds, reptiles, amphibians, fish, and worms. In some embodiments, the animal is a transgenic animal, genetically-engineered animal, or a clone.

[0550] Antigens of interest or desired antigens: As used herein, the terms “antigens of interest” or “desired antigens” refers to those proteins and/or other biomolecules provided herein that are immunospecifically bound or interact with antibodies of the present invention and/or fragments, mutants, variants, and/or alterations thereof described herein. In some embodiments, antigens of interest may comprise TGF-β-related proteins, growth factors, prodomains, GPCs, protein modules or regions of overlap between them.

[0551] Approximately: As used herein, the term “approximately” or “about,” as applied to one or more values of interest, refers to a value that is similar to a stated reference value. In certain embodiments, the term “approximately” or “about” refers to a range of values that fall within 25%, 20%, 19%, 18%, 17%, 16%, 15%, 14%, 13%, 12%, 11%, 10%, 9%, 8%, 7%, 6%, 5%, 4%, 3%, 2%, 1%, or less in either direction (greater than or less than) of the stated reference value unless otherwise stated or otherwise evident from the context (except where such number would exceed 100% of a possible value).

[0552] Associated with: As used herein, the terms “associated with,” “conjugated,” “linked,” “attached,” and “tethered,” when used with respect to two or more moieties, mean that the moieties are physically associated or connected with one another, either directly or via one or more additional moieties that serve as linking agents, to form a structure that is sufficiently stable so that the moieties remain physically associated under the conditions in which the structure is used, e.g., physiological conditions. An “association” need not be strictly through direct covalent chemical bonding. It may also suggest ionic or hydrogen bonding or a hybridization based connectivity sufficiently stable such that the “associated” entities remain physically associated.

[0553] Biomolecules: As used herein, the term “biomolecule” is any natural molecule which is amino acid-based, nucleic acid-based, carbohydrate-based or lipid-based, and the like.

[0554] Biologically active: As used herein, the phrase “biologically active” refers to a characteristic of any substance that has activity in a biological system and/or organism. For instance, a substance that, when administered to an organism, has a biological effect on that organism, is considered to be biologically active. In particular embodiments, a compounds and/or compositions of the present invention may be considered biologically active if even a portion of is biologically active or mimics an activity considered to biologically relevant.

[0555] Biological system: As used herein, the term “biological system” refers to a group of organs, tissues, cells, intracellular components, proteins, nucleic acids, molecules (including, but not limited to biomolecules) that function together to perform a certain biological task within cellular membranes, cellular compartments, cells, tissues, organs, organ systems, multicellular organisms, or any biological entity. Biological systems may be in vitro or in vivo. In some embodiments, biological systems are cell signaling pathways comprising intracellular and/or extracellular cell signaling biomolecules. In some embodiments, biological systems comprise growth factor signaling events within the extracellular matrix, cellular matrix and/or cellular niches.

[0556] Candidate antibody: As used herein, the term “candidate antibody” refers to an antibody from a pool of one or more antibody from which one or more desired antibodies may be selected.

[0557] Cellular matrix: As used herein, the term “cellular matrix” refers to the biochemical and structural environment associated with the outer portion of the cell membrane. Such cell membranes may also include platelet membranes. Components of the cellular matrix may include, but are not limited to proteoglycans, carbohydrate molecules, integral membrane proteins, glycolipids and the like. In some cases, cellular matrix components may include growth factors and/or modulators of growth factor activity. Some cellular matrix proteins include integrins, GARP and LRRC33.

[0558] Compound: As used herein, the term “compound,” refers to a distinct chemical entity The term may be used herein to refer to peptides, proteins, protein complexes or antibodies of the invention. In some embodiments, a particular compound may exist in one or more isomeric or isotopic forms (including, but not limited to stereoisomers, geometric isomers and isotopes). In some embodiments, a compound is provided or utilized in only a single such form. In some embodiments, a compound is provided or utilized as a mixture of two or more such forms (including, but not limited to a racemic mixture of stereoisomers). Those of skill in the art appreciate that some compounds exist in different such forms, show different properties and/or activities (including, but not limited to biological activities). In such cases it is within the ordinary skill of those in the art to select or avoid particular forms of the compound for use in accordance with the present invention. For example, compounds that contain asymmetrically substituted carbon atoms can be isolated in optically active or racemic forms. Methods on how to prepare optically active forms from optically active starting materials are known in the art, such as by resolution of racemic mixtures or by stereoselective synthesis.

[0559] Conserved: As used herein, the term “conserved” refers to nucleotides or amino acid residues of polynucleotide or polypeptide sequences, respectively, that are those that occur unaltered in the same position of two or more sequences being compared. Nucleotides or amino acids that are relatively conserved are those that are conserved among more related sequences than nucleotides or amino acids appearing elsewhere in the sequences.

[0560] In some embodiments, two or more sequences are said to be “completely conserved” if they are 100% identical to one another. In some embodiments, two or more sequences are said to be “highly conserved” if they are at least 70% identical, at least 80% identical, at least 90% identical, or at least 95% identical to one another. In some embodiments, two or more sequences are said to be “highly conserved” if they are about 70% identical, about 80% identical, about 90% identical, about 95%, about 98%, or about 99% identical to one another. In some embodiments, two or more sequences are said to be “conserved” if they are at least 30% identical, at least 40% identical, at least 50% identical, at least 60% identical, at least 70% identical, at least 80% identical, at least 90% identical, or at least 95% identical to one another. In some embodiments, two or more sequences are said to be “conserved” if they are about 30% identical, about 40% identical, about 50% identical, about 60% identical, about 70% identical, about 80% identical, about 90% identical, about 95% identical, about 98% identical, or about 99% identical to one another. Conservation of sequence may apply to the entire length of an oligonucleotide or polypeptide or may apply to a portion, region or feature thereof

[0561] In one embodiment, conserved sequences are not contiguous. Those skilled in the art are able to appreciate how to achieve alignment when gaps in contiguous alignment are present between sequences, and to align corresponding residues not withstanding insertions or deletions present.

[0562] Delivery: As used herein, “delivery” refers to the act or manner of delivering a compound, substance, entity, moiety, cargo or payload.

[0563] Delivery Agent: As used herein, “delivery agent” refers to any agent which facilitates, at least in part, the in vivo delivery of one or more substances (including, but not limited to a compounds and/or compositions of the present invention) to a cell, subject or other biological system cells.

[0564] Desired antibody: As used herein, the term “desired antibody” refers to an antibody that is sought after, in some cases from a pool of candidate antibodies.

[0565] Destabilized: As used herein, the term “destable,” “destabilize,” or “destabilizing region” means a region or molecule that is less stable than a starting, reference, wild-type or native form of the same region or molecule.

[0566] Detectable label: As used herein, “detectable label” refers to one or more markers, signals, or moieties which are attached, incorporated or associated with another entity, which markers, signals or moieties are readily detected by methods known in the art including radiography, fluorescence, chemiluminescence, enzymatic activity, absorbance, immunological detection and the like. Detectable labels may include radioisotopes, fluorophores, chromophores, enzymes, dyes, metal ions, ligands, biotin, avidin, streptavidin and haptens, quantum dots, polyhistidine tags, myc tags, flag tags, human influenza hemagglutinin (HA) tags and the like. Detectable labels may be located at any position in the entity with which they are attached, incorporated or associated. For example, when attached, incorporated in or associated with a peptide or protein, they may be within the amino acids, the peptides, or proteins, or located at the N- or C-termini.

[0567] Distal: As used herein, the term “distal” means situated away from the center or away from a point or region of interest.

[0568] Engineered: As used herein, embodiments of the invention are “engineered” when they are designed to have a feature or property, whether structural or chemical, that varies from a starting point, wild type or native molecule. Thus, engineered agents or entities are those whose design and/or production include an act of the hand of man.

[0569] Epitope: As used herein, an “epitope” refers to a surface or region on a molecule that is capable of interacting with components of the immune system, including, but not limited to antibodies. In some embodiments, when referring to a protein or protein module, an epitope may comprise a linear stretch of amino acids or a three dimensional structure formed by folded amino acid chains.

[0570] Expression: As used herein, “expression” of a nucleic acid sequence refers to one or more of the following events: (1) production of an RNA template from a DNA sequence (e.g., by transcription); (2) processing of an RNA transcript (e.g., by splicing, editing, 5′ cap formation, and/or 3′ end processing); (3) translation of an RNA into a polypeptide or protein; (4) folding of a polypeptide or protein; and (5) post-translational modification of a polypeptide or protein.

[0571] Extracellular matrix: As used herein, the term, “extracellular matrix,” or “ECM” refers to the area surrounding cells and/or the area between cells that typically comprises structural proteins as well as cell signaling molecules. Components of the extracellular matrix may include, but are not limited to proteins, nucleic acids, membranes, lipids and sugars that may be directly or indirectly associated with structural components of the extracellular environments. Structural components of the extracellular matrix may include, but are not limited to proteins, polysaccharides (e.g. hyaluronic acid), glycosaminoglycans and proteoglycans (e.g. heparin sulfate, chondroitin sulfate and keratin sulfate). Such structural components may include, but are not limited to fibrous components (e.g. collagens and elastins), fibrillins, fibronectin, laminins, agrin, perlecan, decorin and the like. Other proteins that may be components of the extracellular matrix include and LTBPs. Extracellular matrix components may also include growth factors and/or modulators of growth factor activity.

[0572] Feature: As used herein, a “feature” refers to a characteristic, a property, or a distinctive element.

[0573] Formulation: As used herein, a “formulation” includes at least a compound and/or composition of the present invention and a delivery agent.

[0574] Fragment: A “fragment,” as used herein, refers to a portion. For example, fragments of proteins may comprise polypeptides obtained by digesting full-length protein isolated from cultured cells. In some embodiments, a fragment of a protein includes at least 3, 4, 5, 6, 7, 8, 9, 10, 11, 12, 13, 14, 15, 16, 17, 18, 19, 20, 25, 30, 35, 40, 45, 50, 55, 60, 65, 70, 75, 80, 85, 90, 95, 100, 150, 200, 250 or more amino acids. In some embodiments, fragments of an antibody include portions of an antibody subjected to enzymatic digestion or synthesized as such.

[0575] Functional: As used herein, a “functional” biological molecule is a biological entity with a structure and in a form in which it exhibits a property and/or activity by which it is characterized.

[0576] Homology: As used herein, the term “homology” refers to the overall relatedness between polymeric molecules, e.g. between nucleic acid molecules (e.g. DNA molecules and/or RNA molecules) and/or between polypeptide molecules. In some embodiments, polymeric molecules are considered to be “homologous” to one another if their sequences are at least 25%, 30%, 35%, 40%, 45%, 50%, 55%, 60%, 65%, 70%, 75%, 80%, 85%, 90%, 95%, or 99% identical or similar. The term “homologous” necessarily refers to a comparison between at least two sequences (polynucleotide or polypeptide sequences). In accordance with the invention, two polynucleotide sequences are considered to be homologous if the polypeptides they encode are at least about 50%, 60%, 70%, 80%, 90%, 95%, or even 99% for at least one stretch of at least about 20 amino acids. In some embodiments, homologous polynucleotide sequences are characterized by the ability to encode a stretch of at least 4-5 uniquely specified amino acids. For polynucleotide sequences less than 60 nucleotides in length, homology is typically determined by the ability to encode a stretch of at least 4-5 uniquely specified amino acids. In accordance with the invention, two protein sequences are considered to be homologous if the proteins are at least about 50%, 60%, 70%, 80%, or 90% identical for at least one stretch of at least about 20 amino acids. In many embodiments, homologous protein may show a large overall degree of homology and a high degree of homology over at least one short stretch of at least 3, 4, 5, 6, 7, 8, 9, 10, 11, 12, 13, 14, 15, 16, 17, 18, 19, 20, 25, 30, 35, 40, 45, 50 or more amino acids. In many embodiments, homologous proteins share one or more characteristic sequence elements. As used herein, the term “characteristic sequence element” refers to a motif present in related proteins. In some embodiments, the presence of such motifs correlates with a particular activity (such as biological activity).

[0577] Identity: As used herein, the term “identity” refers to the overall relatedness between polymeric molecules, e.g., between oligonucleotide molecules (e.g. DNA molecules and/or RNA molecules) and/or between polypeptide molecules. Calculation of the percent identity of two polynucleotide sequences, for example, may be performed by aligning the two sequences for optimal comparison purposes (e.g., gaps can be introduced in one or both of a first and a second nucleic acid sequences for optimal alignment and non-identical sequences can be disregarded for comparison purposes). In certain embodiments, the length of a sequence aligned for comparison purposes is at least 30%, at least 40%, at least 50%, at least 60%, at least 70%, at least 80%, at least 90%, at least 95%, or 100% of the length of the reference sequence. The nucleotides at corresponding nucleotide positions are then compared. When a position in the first sequence is occupied by the same nucleotide as the corresponding position in the second sequence, then the molecules are identical at that position. The percent identity between the two sequences is a function of the number of identical positions shared by the sequences, taking into account the number of gaps, and the length of each gap, which needs to be introduced for optimal alignment of the two sequences. The comparison of sequences and determination of percent identity between two sequences can be accomplished using a mathematical algorithm. For example, the percent identity between two nucleotide sequences can be determined using methods such as those described in Computational Molecular Biology, Lesk, A. M., ed., Oxford University Press, New York, 1988; Biocomputing: Informatics and Genome Projects, Smith, D. W., ed., Academic Press, New York, 1993; Sequence Analysis in Molecular Biology, von Heinje, G., Academic Press, 1987; Computer Analysis of Sequence Data, Part I, Griffin, A. M., and Griffin, H. G., eds., Humana Press, New Jersey, 1994; and Sequence Analysis Primer, Gribskov, M. and Devereux, J., eds., M Stockton Press, New York, 1991; each of which is incorporated herein by reference. For example, the percent identity between two nucleotide sequences can be determined, for example using the algorithm of Meyers and Miller (CABIOS, 1989, 4:11-17), which has been incorporated into the ALIGN program (version 2.0) using a PAM120 weight residue table, a gap length penalty of 12 and a gap penalty of 4. The percent identity between two nucleotide sequences can, alternatively, be determined using the GAP program in the GCG software package using an NWSgapdna. CMP matrix. Methods commonly employed to determine percent identity between sequences include, but are not limited to those disclosed in Carillo, H., and Lipman, D., SIAM J Applied Math., 48:1073 (1988); incorporated herein by reference. Techniques for determining identity are codified in publicly available computer programs. Exemplary computer software to determine homology between two sequences include, but are not limited to, GCG program package, Devereux, J., et al., Nucleic Acids Research, 12(1), 387 (1984)), BLASTP, BLASTN, and FASTA Altschul, S. F. et al., J. Molec. Biol., 215, 403 (1990)).

[0578] Inhibit expression of a gene: As used herein, the phrase “inhibit expression of a gene” means to cause a reduction in the amount of an expression product of the gene. The expression product may be RNA transcribed from the gene (e.g. mRNA) or a polypeptide translated from mRNA transcribed from the gene. Typically a reduction in the level of mRNA results in a reduction in the level of a polypeptide translated therefrom. The level of expression may be determined using standard techniques for measuring mRNA or protein.

[0579] In vitro: As used herein, the term “in vitro” refers to events that occur in an artificial environment, e.g., in a test tube or reaction vessel, in cell culture, in a Petri dish, etc., rather than within an organism (e.g., animal, plant, or microbe).

[0580] In vivo: As used herein, the term “in vivo” refers to events that occur within an organism (e.g., subject, animal, plant, or microbe or cell, niche, body fluid, tissue, organ or organ system thereof).

[0581] Isolated: As used herein, the term “isolated” is synonymous with “separated”, but carries with it the inference separation was carried out by the hand of man. In one embodiment, an isolated substance or entity is one that has been separated from at least some of the components with which it was previously associated (whether in nature or in an experimental setting). Isolated substances may have varying levels of purity in reference to the substances from which they have been associated. Isolated substances and/or entities may be separated from at least about 10%, about 20%, about 30%, about 40%, about 50%, about 60%, about 70%, about 80%, about 90%, or more of the other components with which they were initially associated. In some embodiments, isolated agents are more than about 80%, about 85%, about 90%, about 91%, about 92%, about 93%, about 94%, about 95%, about 96%, about 97%, about 98%, about 99%, or more than about 99% pure. As used herein, a substance is “pure” if it is substantially free of other components.

[0582] Substantially isolated: By “substantially isolated” is meant that the compound is substantially separated from the environment in which it was formed or detected. Partial separation can include, for example, a composition enriched in the compound of the present disclosure. Substantial separation can include compositions containing at least about 50%, at least about 60%, at least about 70%, at least about 80%, at least about 90%, at least about 95%, at least about 97%, or at least about 99% by weight of the compound of the present disclosure, or salt thereof. Methods for isolating compounds and their salts are routine in the art. In some embodiments, isolation of a substance or entity includes disruption of chemical associations and/or bonds. In some embodiments, isolation includes only the separation from components with which the isolated substance or entity was previously combined and does not include such disruption.

[0583] Linker: As used herein, a linker refers to a moiety that connects two or more domains, moieties or entities. In one embodiment, a linker may comprise 10 or more atoms. In a further embodiment, a linker may comprise a group of atoms, e.g., 10-1,000 atoms, and can be comprised of the atoms or groups such as, but not limited to, carbon, amino, alkylamino, oxygen, sulfur, sulfoxide, sulfonyl, carbonyl, and imine. In some embodiments, a linker may comprise one or more nucleic acids comprising one or more nucleotides. In some embodiments, the linker may comprise an amino acid, peptide, polypeptide or protein. In some embodiments, a moiety bound by a linker may include, but is not limited to an atom, a chemical group, a nucleoside, a nucleotide, a nucleobase, a sugar, a nucleic acid, an amino acid, a peptide, a polypeptide, a protein, a protein complex, a payload (e.g., a therapeutic agent). or a marker (including, but not limited to a chemical, fluorescent, radioactive or bioluminescent marker). The linker can be used for any useful purpose, such as to form multimers or conjugates, as well as to administer a payload, as described herein. Examples of chemical groups that can be incorporated into the linker include, but are not limited to, alkyl, alkenyl, alkynyl, amido, amino, ether, thioether, ester, alkylene, heteroalkylene, aryl, or heterocyclyl, each of which can be optionally substituted, as described herein. Examples of linkers include, but are not limited to, unsaturated alkanes, polyethylene glycols (e.g., ethylene or propylene glycol monomeric units, e.g., diethylene glycol, dipropylene glycol, triethylene glycol, tripropylene glycol, tetraethylene glycol, or tetraethylene glycol), and dextran polymers, Other examples include, but are not limited to, cleavable moieties within the linker, such as, for example, a disulfide bond (—S—S—) or an azo bond (—N═N—), which can be cleaved using a reducing agent or photolysis. Non-limiting examples of a selectively cleavable bonds include an amido bond which may be cleaved for example by the use of tris(2-carboxyethyl)phosphine (TCEP), or other reducing agents, and/or photolysis, as well as an ester bond which may be cleaved for example by acidic or basic hydrolysis.

[0584] Modified: As used herein, the term “modified” refers to a changed state or structure of a molecule or entity as compared with a parent or reference molecule or entity. Molecules may be modified in many ways including chemically, structurally, and functionally. In some embodiments, compounds and/or compositions of the present invention are modified by the introduction of non-natural amino acids.

[0585] Mutation: As used herein, the term “mutation” refers to a change and/or alteration. In some embodiments, mutations may be changes and/or alterations to proteins (including peptides and polypeptides) and/or nucleic acids (including polynucleic acids). In some embodiments, mutations comprise changes and/or alterations to a protein and/or nucleic acid sequence. Such changes and/or alterations may comprise the addition, substitution and or deletion of one or more amino acids (in the case of proteins and/or peptides) and/or nucleotides (in the case of nucleic acids and or polynucleic acids). In embodiments wherein mutations comprise the addition and/or substitution of amino acids and/or nucleotides, such additions and/or substitutions may comprise 1 or more amino acid and/or nucleotide residues and may include modified amino acids and/or nucleotides.

[0586] Naturally occurring: As used herein, “naturally occurring” means existing in nature without artificial aid, or involvement of the hand of man.

[0587] Niche: As used herein, the term “niche” refers to a place, zone and/or habbitat. In some embodiments, niches comprise cellular niches. As used herein, the term “cell niche” refers to a unique set of physiologic conditions in a cellular system within a tissue, organ or organ system within or derived from a mammalian organism. A cell niche may occur in vivo, in vitro, ex vivo, or in situ. Given the complex nature and the dynamic processes involved in growth factor signaling, a cell niche may be characterized functionally, spatially or temporally or may be used to refer to any environment that encompasses one or more cells. As such, in some embodiments a cell niche includes the environment of any cell adjacent to another cell that provides support, such as for example a nurse cell. In some embodiments, niches may include those described in International Patent Application No. WO2014074532, the contents of which are herein incorporated by reference in their entirety.

[0588] Non-human vertebrate: As used herein, a “non-human vertebrate” includes all vertebrates except Homo sapiens, including wild and domesticated species. Examples of non-human vertebrates include, but are not limited to, mammals, such as alpaca, banteng, bison, camel, cat, cattle, deer, dog, donkey, gayal, goat, guinea pig, horse, llama, mule, pig, rabbit, reindeer, sheep water buffalo, and yak.

[0589] Off-target: As used herein, “off target” refers to any unintended effect on any one or more target, gene and/or cellular transcript.

[0590] Operably linked: As used herein, the phrase “operably linked” refers to a functional connection between two or more molecules, constructs, transcripts, entities, moieties or the like.

[0591] Paratope: As used herein, a “paratope” refers to the antigen-binding site of an antibody.

[0592] Passive adsorption: As used herein, “passive adsorption” refers to a method of immobilizing solid-phase reactants on one or more surfaces (e.g. membranes, dishes, culture dishes, assay plates, etc.). Immobilization typically occurs due to affinity between such reactants and surface components.

[0593] Patient: As used herein, “patient” refers to a subject who may seek or be in need of treatment, requires treatment, is receiving treatment, will receive treatment, or a subject who is under care by a trained (e.g., licensed) professional for a particular disease or condition.

[0594] Peptide: As used herein, the term “peptide” refers to a chain of amino acids that is less than or equal to about 50 amino acids long, e.g., about 5, 10, 15, 20, 25, 30, 35, 40, 45, or 50 amino acids long.

[0595] Pharmaceutically acceptable: The phrase “pharmaceutically acceptable” is employed herein to refer to those compounds, materials, compositions, and/or dosage forms which are, within the scope of sound medical judgment, suitable for use in contact with the tissues of human beings and animals without excessive toxicity, irritation, allergic response, or other problem or complication, commensurate with a reasonable benefit/risk ratio.

[0596] Pharmaceutically acceptable excipients: As used herein, the term “pharmaceutically acceptable excipient,” as used herein, refers to any ingredient other than active agents (e.g., as described herein) present in pharmaceutical compositions and having the properties of being substantially nontoxic and non-inflammatory in subjects. In some embodiments, pharmaceutically acceptable excipients are vehicles capable of suspending and/or dissolving active agents. Excipients may include, for example: antiadherents, antioxidants, binders, coatings, compression aids, disintegrants, dyes (colors), emollients, emulsifiers, fillers (diluents), film formers or coatings, flavors, fragrances, glidants (flow enhancers), lubricants, preservatives, printing inks, sorbents, suspending or dispersing agents, sweeteners, and waters of hydration. Exemplary excipients include, but are not limited to: butylated hydroxytoluene (BHT), calcium carbonate, calcium phosphate (dibasic), calcium stearate, croscarmellose, crosslinked polyvinyl pyrrolidone, citric acid, crospovidone, cysteine, ethylcellulose, gelatin, hydroxypropyl cellulose, hydroxypropyl methylcellulose, lactose, magnesium stearate, maltitol, mannitol, methionine, methylcellulose, methyl paraben, microcrystalline cellulose, polyethylene glycol, polyvinyl pyrrolidone, povidone, pregelatinized starch, propyl paraben, retinyl palmitate, shellac, silicon dioxide, sodium carboxymethyl cellulose, sodium citrate, sodium starch glycolate, sorbitol, starch (corn), stearic acid, sucrose, talc, titanium dioxide, vitamin A, vitamin E, vitamin C, and xylitol.

[0597] Pharmaceutically acceptable salts: Pharmaceutically acceptable salts of the compounds described herein are forms of the disclosed compounds wherein the acid or base moiety is in its salt form (e.g., as generated by reacting a free base group with a suitable organic acid). Examples of pharmaceutically acceptable salts include, but are not limited to, mineral or organic acid salts of basic residues such as amines; alkali or organic salts of acidic residues such as carboxylic acids; and the like. Representative acid addition salts include acetate, adipate, alginate, ascorbate, aspartate, benzenesulfonate, benzoate, bisulfate, borate, butyrate, camphorate, camphorsulfonate, citrate, cyclopentanepropionate, digluconate, dodecylsulfate, ethanesulfonate, fumarate, glucoheptonate, glycerophosphate, hemisulfate, heptonate, hexanoate, hydrobromide, hydrochloride, hydroiodide, 2-hydroxy-ethanesulfonate, lactobionate, lactate, laurate, lauryl sulfate, malate, maleate, malonate, methanesulfonate, 2-naphthalenesulfonate, nicotinate, nitrate, oleate, oxalate, palmitate, pamoate, pectinate, persulfate, 3-phenylpropionate, phosphate, picrate, pivalate, propionate, stearate, succinate, sulfate, tartrate, thiocyanate, toluenesulfonate, undecanoate, valerate salts, and the like. Representative alkali or alkaline earth metal salts include sodium, lithium, potassium, calcium, magnesium, and the like, as well as nontoxic ammonium, quaternary ammonium, and amine cations, including, but not limited to ammonium, tetramethylammonium, tetraethylammonium, methylamine, dimethylamine, trimethylamine, triethylamine, ethylamine, and the like. Pharmaceutically acceptable salts include the conventional non-toxic salts, for example, from non-toxic inorganic or organic acids. In some embodiments a pharmaceutically acceptable salt is prepared from a parent compound which contains a basic or acidic moiety by conventional chemical methods. Generally, such salts can be prepared by reacting the free acid or base forms of these compounds with a stoichiometric amount of the appropriate base or acid in water or in an organic solvent, or in a mixture of the two; generally, nonaqueous media like ether, ethyl acetate, ethanol, isopropanol, or acetonitrile are preferred. Lists of suitable salts are found in Remington's Pharmaceutical Sciences, 17^{th} ed., Mack Publishing Company, Easton, Pa., 1985, p. 1418, Pharmaceutical Salts: Properties, Selection, and Use, P. H. Stahl and C. G. Wermuth (eds.), Wiley-VCH, 2008, and Berge et al., Journal of Pharmaceutical Science, 66, 1-19 (1977), each of which is incorporated herein by reference in its entirety. Pharmaceutically acceptable solvate: The term “pharmaceutically acceptable solvate,” as used herein, refers to a crystalline form of a compound wherein molecules of a suitable solvent are incorporated in the crystal lattice. For example, solvates may be prepared by crystallization, recrystallization, or precipitation from a solution that includes organic solvents, water, or a mixture thereof. Examples of suitable solvents are ethanol, water (for example, mono-, di-, and tri-hydrates), N-methylpyrrolidinone (NMP), dimethyl sulfoxide (DMSO), N,N′-dimethylformamide (DMF), N,N′-dimethylacetamide (DMAC), 1,3-dimethyl-2-imidazolidinone (DMEU), 1,3-dimethyl-3,4,5,6-tetrahydro-2-(1H)-pyrimidinone (DMPU), acetonitrile (ACN), propylene glycol, ethyl acetate, benzyl alcohol, 2-pyrrolidone, benzyl benzoate, and the like. When water is the solvent, the solvate is referred to as a “hydrate.” In some embodiments, the solvent incorporated into a solvate is of a type or at a level that is physiologically tolerable to an organism to which the solvate is administered (e.g., in a unit dosage form of a pharmaceutical composition).

[0598] Pharmacokinetic: As used herein, “pharmacokinetic” refers to any one or more properties of a molecule or compound as it relates to the determination of the fate of substances administered to living organisms. Pharmacokinetics are divided into several areas including the extent and rate of absorption, distribution, metabolism and excretion. This is commonly referred to as ADME where: (A) Absorption is the process of a substance entering the blood circulation; (D) Distribution is the dispersion or dissemination of substances throughout the fluids and tissues of the body; (M) Metabolism (or Biotransformation) is the irreversible transformation of parent compounds into daughter metabolites; and (E) Excretion (or Elimination) refers to the elimination of the substances from the body. In rare cases, some drugs irreversibly accumulate in body tissue.

[0599] Physicochemical: As used herein, “physicochemical” means of or relating to a physical and/or chemical property.

[0600] Preventing: As used herein, the term “preventing” refers to partially or completely delaying onset of an infection, disease, disorder and/or condition; partially or completely delaying onset of one or more symptoms, features, or clinical manifestations of a particular infection, disease, disorder, and/or condition; partially or completely delaying onset of one or more symptoms, features, or manifestations of a particular infection, disease, disorder, and/or condition; partially or completely delaying progression from an infection, a particular disease, disorder and/or condition; and/or decreasing the risk of developing pathology associated with the infection, the disease, disorder, and/or condition.

[0601] Prodrug: The present disclosure also includes prodrugs of the compounds described herein. As used herein, “prodrugs” refer to any substance, molecule or entity which is in a form predicate for that substance, molecule or entity to act as a therapeutic upon chemical or physical alteration. Prodrugs may be covalently bonded or sequestered in some way until converted into the active drug moiety prior to, upon or after administration to a mammalian subject. Prodrugs can be prepared by modifying functional groups present in the compounds in such a way that the modifications are cleaved, either in routine manipulation or in vivo, to the parent compounds. Prodrugs include compounds wherein hydroxyl, amino, sulfhydryl, or carboxyl groups are bonded to any group that, when administered to a mammalian subject, cleaves to form a free hydroxyl, amino, sulfhydryl, or carboxyl group respectively. Preparation and use of prodrugs is discussed in T. Higuchi and V. Stella, “Pro-drugs as Novel Delivery Systems,” Vol. 14 of the A.C.S. Symposium Series, and in Bioreversible Carriers in Drug Design, ed. Edward B. Roche, American Pharmaceutical Association and Pergamon Press, 1987, both of which are hereby incorporated by reference in their entirety.

[0602] Proliferate: As used herein, the term “proliferate” means to grow, expand, replicate or increase or cause to grow, expand, replicate or increase. “Proliferative” means having the ability to proliferate. “Anti-proliferative” means having properties counter to or in opposition to proliferative properties.

[0603] Protein of interest: As used herein, the terms “proteins of interest” or “desired proteins” include those provided herein and fragments, mutants, variants, and alterations thereof

[0604] Proximal: As used herein, the term “proximal” means situated nearer to the center or to a point or region of interest.

[0605] Purified: As used herein, the term “purify” means to make substantially pure or clear from unwanted components, material defilement, admixture or imperfection. “Purified” refers to the state of being pure. “Purification” refers to the process of making pure.

[0606] Region: As used herein, the term “region” refers to a zone or general area. In some embodiments, when referring to a protein or protein module, a region may comprise a linear sequence of amino acids along the protein or protein module or may comprise a three dimensional area, an epitope and/or a cluster of eptiopes. In some embodiments, regions comprise terminal regions. As used herein, the term “terminal region” refers to regions located at the ends or termini of a given agent. When referring to proteins, terminal regions may comprise N- and/or C-termini. N-termini refer to the end of a protein comprising an amino acid with a free amino group. C-termini refer to the end of a protein comprising an amino acid with a free carboxyl group. N- and/or C-terminal regions may there for comprise the N- and/or C-termini as well as surrounding amino acids. In some embodiments, N- and/or C-terminal regions comprise from about 3 amino acid to about 30 amino acids, from about 5 amino acids to about 40 amino acids, from about 10 amino acids to about 50 amino acids, from about 20 amino acids to about 100 amino acids and/or at least 100 amino acids. In some embodiments, N-terminal regions may comprise any length of amino acids that includes the N-terminus, but does not include the C-terminus. In some embodiments, C-terminal regions may comprise any length of amino acids, that include the C-terminus, but do not comprise the N-terminus.

[0607] Region of antibody recognition: As used herein, the term “region of antibody recognition” refers to one or more regions on one or more antigens or between two or more antigens that are specifically recognized and bound by corresponding antibodies. In some embodiments, regions of antibody recognition may comprise 1, 2, 3, 4, 5, 6, 7, 8, 9 or at least 10 amino acid residues. In some embodiments, regions of antibody recognition comprise a junction between two proteins or between two domains of the same protein that are in close proximity to one another.

[0608] Sample: As used herein, the term “sample” refers to an aliquot or portion taken from a source and/or provided for analysis or processing. In some embodiments, a sample is from a biological source such as a tissue, cell or component part (e.g. a body fluid, including but not limited to blood, mucus, lymphatic fluid, synovial fluid, cerebrospinal fluid, saliva, amniotic fluid, amniotic cord blood, urine, vaginal fluid and semen). In some embodiments, a sample may be or comprise a homogenate, lysate or extract prepared from a whole organism or a subset of its tissues, cells or component parts, or a fraction or portion thereof, including but not limited to, for example, plasma, serum, spinal fluid, lymph fluid, the external sections of the skin, respiratory, intestinal, and genitourinary tracts, tears, saliva, milk, blood cells, tumors, organs. In some embodiments, a sample is or comprises a medium, such as a nutrient broth or gel, which may contain cellular components, such as proteins or nucleic acid molecule. In some embodiments, a “primary” sample is an aliquot of the source. In some embodiments, a primary sample is subjected to one or more processing (e.g., separation, purification, etc.) steps to prepare a sample for analysis or other use.

[0609] Signal Sequences: As used herein, the phrase “signal sequences” refers to a sequence which can direct the transport or localization of a protein.

[0610] Single unit dose: As used herein, a “single unit dose” is a dose of any therapeutic administered in one dose/at one time/single route/single point of contact, i.e., single administration event. In some embodiments, a single unit dose is provided as a discrete dosage form (e.g., a tablet, capsule, patch, loaded syringe, vial, etc.).

[0611] Similarity: As used herein, the term “similarity” refers to the overall relatedness between polymeric molecules, e.g. between polynucleotide molecules (e.g. DNA molecules and/or RNA molecules) and/or between polypeptide molecules. Calculation of percent similarity of polymeric molecules to one another can be performed in the same manner as a calculation of percent identity, except that calculation of percent similarity takes into account conservative substitutions as is understood in the art.

[0612] Split dose: As used herein, a “split dose” is the division of single unit dose or total daily dose into two or more doses.

[0613] Stable: As used herein “stable” refers to a compound or entity that is sufficiently robust to survive isolation to a useful degree of purity from a reaction mixture, and preferably capable of formulation into an efficacious therapeutic agent.

[0614] Stabilized: As used herein, the term “stabilize”, “stabilized,” “stabilized region” means to make or become stable. In some embodiments, stability is measured relative to an absolute value. In some embodiments, stability is measured relative to a reference compound or entity.

[0615] Subject: As used herein, the term “subject” or “patient” refers to any organism to which a composition in accordance with the invention may be administered, e.g., for experimental, diagnostic, prophylactic, and/or therapeutic purposes. Typical subjects include animals (e.g., mammals such as mice, rats, rabbits, non-human primates, and humans) and/or plants.

[0616] Substantially: As used herein, the term “substantially” refers to the qualitative condition of exhibiting total or near-total extent or degree of a characteristic or property of interest. One of ordinary skill in the biological arts will understand that biological and chemical phenomena rarely, if ever, go to completion and/or proceed to completeness or achieve or avoid an absolute result. The term “substantially” is therefore used herein to capture the potential lack of completeness inherent in many biological and chemical phenomena.

[0617] Substantially equal: As used herein as it relates to time differences between doses, the term means plus/minus 2%.

[0618] Substantially simultaneously: As used herein and as it relates to plurality of doses, the term typically means within about 2 seconds.

[0619] Suffering from: An individual who is “suffering from” a disease, disorder, and/or condition has been diagnosed with or displays one or more symptoms of a disease, disorder, and/or condition.

[0620] Susceptible to: An individual who is “susceptible to” a disease, disorder, and/or condition has not been diagnosed with and/or may not exhibit symptoms of the disease, disorder, and/or condition but harbors a propensity to develop a disease or its symptoms. In some embodiments, an individual who is susceptible to a disease, disorder, and/or condition (for example, cancer) may be characterized by one or more of the following: (1) a genetic mutation associated with development of the disease, disorder, and/or condition; (2) a genetic polymorphism associated with development of the disease, disorder, and/or condition; (3) increased and/or decreased expression and/or activity of a protein and/or nucleic acid associated with the disease, disorder, and/or condition; (4) habits and/or lifestyles associated with development of the disease, disorder, and/or condition; (5) a family history of the disease, disorder, and/or condition; and (6) exposure to and/or infection with a microbe associated with development of the disease, disorder, and/or condition. In some embodiments, an individual who is susceptible to a disease, disorder, and/or condition will develop the disease, disorder, and/or condition. In some embodiments, an individual who is susceptible to a disease, disorder, and/or condition will not develop the disease, disorder, and/or condition.

[0621] Synthetic: The term “synthetic” means produced, prepared, and/or manufactured by the hand of man. Synthesis of polynucleotides or polypeptides or other molecules of the present invention may be chemical or enzymatic.

[0622] Targeted Cells: As used herein, “targeted cells” refers to any one or more cells of interest. The cells may be found in vitro, in vivo, in situ or in the tissue or organ of an organism. The organism may be an animal, preferably a mammal, more preferably a human and most preferably a patient.

[0623] Target site: The term “target site” as used herein, refers to a region or area targeted by a given compound, composition or method of the invention. Target sites may include, but are not limited to cells, tissues, organs, organ systems, niches and the like.

[0624] Therapeutic Agent: The term “therapeutic agent” refers to any agent that, when administered to a subject, has a therapeutic, diagnostic, and/or prophylactic effect and/or elicits a desired biological and/or pharmacological effect.

[0625] Therapeutically effective amount: As used herein, the term “therapeutically effective amount” means an amount of an agent to be delivered (e.g., nucleic acid, drug, therapeutic agent, diagnostic agent, prophylactic agent, etc.) that is sufficient, when administered to a subject suffering from or susceptible to an infection, disease, disorder, and/or condition, to treat, improve symptoms of, diagnose, prevent, and/or delay the onset of the infection, disease, disorder, and/or condition. In some embodiments, a therapeutically effective amount is provided in a single dose. In some embodiments, a therapeutically effective amount is administered in a dosage regimen comprising a plurality of doses. Those skilled in the art will appreciate that in some embodiments, a unit dosage form may be considered to comprise a therapeutically effective amount of a particular agent or entity if it comprises an amount that is effective when administered as part of such a dosage regimen.

[0626] Therapeutically effective outcome: As used herein, the term “therapeutically effective outcome” means an outcome that is sufficient in a subject suffering from or susceptible to an infection, disease, disorder, and/or condition, to treat, improve symptoms of, diagnose, prevent, and/or delay the onset of the infection, disease, disorder, and/or condition.

[0627] Total daily dose: As used herein, a “total daily dose” is an amount given or prescribed in a 24 hr period. It may be administered as a single unit dose.

[0628] Transcription factor: As used herein, the term “transcription factor” refers to a DNA-binding protein that regulates transcription of DNA into RNA, for example, by activation or repression of transcription. Some transcription factors effect regulation of transcription alone, while others act in concert with other proteins. Some transcription factor can both activate and repress transcription under certain conditions. In general, transcription factors bind a specific target sequence or sequences highly similar to a specific consensus sequence in a regulatory region of a target gene. Transcription factors may regulate transcription of a target gene alone or in a complex with other molecules.

[0629] Treating: As used herein, the term “treating” refers to partially or completely alleviating, ameliorating, improving, relieving, delaying onset of, inhibiting progression of, reducing severity of, and/or reducing incidence of one or more symptoms or features of a particular infection, disease, disorder, and/or condition. For example, “treating” cancer may refer to inhibiting survival, growth, and/or spread of a tumor. Treatment may be administered to a subject who does not exhibit signs of a disease, disorder, and/or condition and/or to a subject who exhibits only early signs of a disease, disorder, and/or condition for the purpose of decreasing the risk of developing pathology associated with the disease, disorder, and/or condition.

[0630] Unmodified: As used herein, “unmodified” refers to any substance, compound or molecule prior to being changed in any way. Unmodified may, but does not always, refer to the wild type or native form of a biomolecule or entity. Molecules or entities may undergo a series of modifications whereby each modified product may serve as the “unmodified” starting molecule or entity for a subsequent modification.

### EQUIVALENTS AND SCOPE

[0631] Those skilled in the art will recognize, or be able to ascertain using no more than routine experimentation, many equivalents to the specific embodiments in accordance with the invention described herein. The scope of the present invention is not intended to be limited to the above Description, but rather is as set forth in the appended claims.

[0632] In the claims, articles such as “a,” “an,” and “the” may mean one or more than one unless indicated to the contrary or otherwise evident from the context. Claims or descriptions that include “or” between one or more members of a group are considered satisfied if one, more than one, or all of the group members are present in, employed in, or otherwise relevant to a given product or process unless indicated to the contrary or otherwise evident from the context. The invention includes embodiments in which exactly one member of the group is present in, employed in, or otherwise relevant to a given product or process. The invention includes embodiments in which more than one, or the entire group members are present in, employed in, or otherwise relevant to a given product or process.

[0633] It is also noted that the term “comprising” is intended to be open and permits but does not require the inclusion of additional elements or steps. When the term “comprising” is used herein, the term “consisting of” is thus also encompassed and disclosed.

[0634] Where ranges are given, endpoints are included. Furthermore, it is to be understood that unless otherwise indicated or otherwise evident from the context and understanding of one of ordinary skill in the art, values that are expressed as ranges can assume any specific value or subrange within the stated ranges in different embodiments of the invention, to the tenth of the unit of the lower limit of the range, unless the context clearly dictates otherwise.

[0635] In addition, it is to be understood that any particular embodiment of the present invention that falls within the prior art may be explicitly excluded from any one or more of the claims. Since such embodiments are deemed to be known to one of ordinary skill in the art, they may be excluded even if the exclusion is not set forth explicitly herein. Any particular embodiment of the compositions of the invention (e.g., any nucleic acid or protein encoded thereby; any method of production; any method of use; etc.) can be excluded from any one or more claims, for any reason, whether or not related to the existence of prior art.

[0636] All cited sources, for example, references, publications, databases, database entries, and art cited herein, are incorporated into this application by reference, even if not expressly stated in the citation. In case of conflicting statements of a cited source and the instant application, the statement in the instant application shall control.

[0637] Section and table headings are not intended to be limiting.

### EXAMPLES

### Example 1

### Protein Expression Method 1

[0638] Protein expression is carried out using 293E cells. 293E cells are HEK293 cells stably expressing EBNA1 (Epstein-Barr virus nuclear antigen-1). These cells are human cells that post-translationally modify proteins with human-like structures (e.g. glycans). Such cells are easily transfectable and scalable and are able to grow to high densities in suspension culture. During protein production, 293E cells are grown in serum-free medium to facilitate down-stream purification. Some of the proteins produced comprise additional amino acids encoding one or more detectable labels for purification [e.g. polyhistidine tag, flag tag (DYKDDDDK; SEQ ID NO: 100), etc.] Proteins are N-terminally labeled, C-terminally labeled and/or biotinylated.

[0639] Some of the proteins produced comprise additional amino acids encoding one or more 3C protease cleavage site (LEVLFQGP; SEQ ID NO: 101) Such sites allow for cleavage between residues Q and G of the 3C protease cleavage site upon treatment with 3C protease, including with rhinovirus 3C protease. Cleavage sites are introduced to allow for removal of detectable labels from recombinant proteins.

[0640] Sequences encoding recombinant proteins of the present invention are cloned into pTT5 vectors (NRC Biotechnology Research Institute, Montréal, Québec) for transfection into cells. Such vectors are small (˜4.4 kb), facilitate transient transfection, comprise a strong CMV promoter for robust protein synthesis and comprise an oriP for episomal replication in EBNA1-expressing cells.

### Example 2

### Protein Expression Method 2

[0641] Cells (293-6E cells) transiently expressing tagged proteins are cultured in serum-free medium (FreeStyle F17 medium, Life Technologies, Carlsbad, Calif.) supplemented with 4 mM glutamine, 0.1% Kolliphor P 188 and 25 μg/ml G418. Once their viability drops below 50%, tissue culture supernatant is collected and cleared by centrifugation for 10 minutes at 450× gravity at 4° C. Supernatant is then filtered by passing it through a 0.22 μm pore filter. Filtered supernatant is combined with Tris, NaCl and NiCl2 for a final concentration of 50 mM Tris pH 8.0, 350 mM NaCl and 0.5 mM NiCl2. 1 ml of the adjusted solution is collected for later analysis by SDS-poly acrylamide gel electrophoresis (PAGE) or Western blot. The remaining portion of the adjusted solution is combined with washed Ni-NTA resin (Qiagen, Valencia, Calif.) at a ratio dependent upon the expression level of the protein, which has been previously determined during small scale trials of the protein. This combined solution is then stirred at 4° C. overnight using a suspended magnetic stir bar (to prevent grinding of Ni-NTA resin). Ni-NTA resin is collected the next morning using an Econo-glass column (BioRad, Waltham, Mass.) with a porous bottom membrane. Repeated direct application of the combined solution to the top of the column loads the Ni NTA resin in a uniform fashion onto the column, alternatively a siphoning system is used to continuously load large volumes of combined solution.

[0642] Next, the column is washed with 10 column volumes (CV) of wash buffer (20 mM Tris, pH 8.0, 500 mM NaCl and 20 mM imidazole). An aliquot of the last wash is collected for analysis. The column is then eluted with elution buffer (20 mM Tris, pH 8.0, 500 mM NaCl and 300 mM imidazole) in increments of 1 CV after incubating on the Ni-NTA resin for 5 minutes at 4 C, until no protein remains on the Ni NTA resin.

[0643] The absorbance at 280 nm is measured in each of the eluted fractions collected and compared to the absorbance at 280 nm of blank elution buffer. Earlier fractions typically have negative absorption due to the imidazole gradient; however, fractions containing higher amounts of protein have positive values. Collected fractions are then run on SDS-PAGE for analysis and relevant fractions are pooled and concentrated for further purification.

[0644] The protein is further purified by size exclusion chromatography (SEC) using a variety of columns including but not limited to (S200, SRT10, 5200 Prep Grade, Superose 6) equilibrated in a variety of buffers including but not limited to PBS, or 20 mM Hepes pH 7.5, 500 mM NaCl. Peak fractions are pooled and concentrated to a concentration of 1-2 mg/mL and aliquots are flash-frozen and stored at −80 C.

[0645] Parental FLP-INTM T-REXTM 293 cells (Life Technologies, Carlsbad, Calif.) are cultured in DMEM media according to the manufacturer's instructions under Zeocin and Blasticidin selection (100 ug/ml Zeocin and 15 ug/ml Blasticidin) to maintain their naïve state. To introduce a protein expression construct of interest into the parental cell line, selection is removed 24 hours in advance and the media switched to Opti-MEM after plating the cells in 6-well plates. Cells are transfected with Lipofectamine 2000 from Life Technologies (Carlsbad, Calif.), using a ratio of 9:1 pOG44 plasmid (Flp recombinase plasmid) to pcDNA5/TO (Life Technologies, Carlsbad, Calif.) plasmid with the expression construct of interest in the multiple cloning site. After 24 hours, cells are switched back to DMEM and 24 hours subsequently cells are expanded to 10 cm plates. When the cells have adhered, selection with Hygromycin and Blasticidin is applied at 100 ug/ml and 15 ug/ml. Upon integration at the Flp site in the genome, Zeocin resistance is lost and Hygromycin resistance is gained in addition to the protein expression construct of interest.

[0646] To induce protein expression, stable Flp-In Trex 293 cells are grown to 90% confluence in DMEM. Cells are then washed with PBS and switched to F17 media supplemented with 4 mM GlutaMax (Life Technologies, Carlsbad, Calif.) in the dish. To induce protein expression, 1 ug/ml tetracycline is added. One day later, Trytone N1 is added to 0.5% weight/volume to provide nutrients for protein expression. Culture continues for up to five days before the supernatant is collected. For certain expression constructs, fresh F17 with 1 ug/ml tetracycline is added to the cells and culture continued for another five days. Tryptone N1 is again added one day after refreshing the cells with new media. Collected supernatant is processed and purified as in paragraph described above.

[0647] To increase yield per liter, ease of culture, and volume of culture, stable adherent Flp-IN T-Rex 293 cell lines for certain constructs are adapted to suspension shaking culture in two steps, first to serum free growth and then shaking growth. Cells are slowly transitioned from DMEM complete media recommended by Life Technologies (Carlsbad, Calif.) to F17 supplemented with 4 mM GlutaMax, and then shaking culture as 0.2% Kolliphor P188 is added to the F17 supplemented with 4 mM GlutaMax. Selection is not maintained during the transition, instead it is reapplied after adaptation to F17 and then again after adaption to shaking culture. To adapt to F17, a stepwise dilution of DMEM with F17 is pursued in increments of 25%. At the last step, a small amount of FBS is added to the F17—approximately 0.2% final concentration —before the final split which is into 100% F17. Cells are split at high ratios of 1:3 or lower, decreasing the time out of selection. As these cells grow robustly, the entire adaption can be completed in about 10 days. After the adaptation is complete, selection is reapplied for at least two passages at 20 ug/ml Hygromycin and 2 ug/ml Blasticidin.

[0648] Following adaptation to F17 in adherent culture and the reapplication of selection, the adherent cells can then be adapted to suspension culture. Two 15 cm diameter dishes are grown to confluency and trypsinized, counted and then seeded in fresh F17 supplemented with 0.2% Kolliphor P 188 and 4 mM GlutaMax at greater than 0.75×106/ml. Cell viability decreases initially, but then increases as does cell number. When the cell doubling time approaches 30 hours, Blasticidin and Hygromycin is in some cases reapplied at 2 ug/ml and 20 ug/ml respectively, but only in the fresh media added to split cells in order to gradually re-introduce the selection.

[0649] Some of the proteins produced comprise additional amino acids encoding one or more detectable labels for purification [e.g. polyhistidine tag, flag tag (DYKDDDDK; SEQ ID NO: 100), etc.] Some proteins are N-terminally labeled, C-terminally labeled and/or biotinylated.

[0650] Some of the proteins produced comprise additional amino acids encoding one or more 3C protease cleavage site (LEVLFQGP; SEQ ID NO: 101) Such sites allow for cleavage between residues Q and G of the 3C protease cleavage site upon treatment with 3C protease, including with rhinovirus 3C protease. Cleavage sites are introduced to allow for removal of detectable labels from recombinant proteins.

### Example 3

### Generation of Antibodies

### Antibodies Produced by Standard Monoclonal Antibody Generation

[0651] Antibodies are generated in knockout mice, lacking the gene that encodes for desired target antigens. Such mice are not tolerized to target antigens and therefore generate antibodies against such antigens that may cross react with human and mouse forms of the antigen. For the production of monoclonal antibodies, host mice are immunized with recombinant proteins (or with cells expressing such proteins) to elicit lymphocytes that specifically bind to these proteins. Lymphocytes are collected and fused with immortalized cell lines. The resulting hybridoma cells are cultured in a suitable culture medium with selection agents to support the growth of only fused cells.

[0652] Desired hybridoma cell lines are then identified through binding specificity analysis of the secreted antibodies for the target peptide and clones of these cells are subcloned through limiting dilution procedures and grown by standard methods. Antibodies produced by these cells are isolated and purified from the culture medium by standard immunoglobulin purification procedures

### Antibodies Produced Recombinantly

[0653] Recombinant antibodies are produced using the hybridoma cells produced above. Heavy and light chain variable region cDNA sequences of the antibodies are determined using standard biochemical techniques. Total RNA are extracted from antibody-producing hybridoma cells and converted to cDNA by reverse transcriptase (RT) polymerase chain reaction (PCR). PCR amplification is carried out on the resulting cDNA using primers specific for amplification of the heavy and light chain sequences. PCR products are then subcloned into plasmids for sequence analysis. Once sequenced, antibody coding sequences are placed into expression vectors. For humanization, coding sequences for human heavy and light chain constant domains are used to substitute for homologous murine sequences. The resulting constructs are transfected into mammalian cells capable of large scale translation.

### Antibodies Produced by Using Antibody Fragment Display Library Screening Techniques

[0654] Antibodies of the present invention may be produced using high throughput methods of discovery. Synthetic antibodies are designed by screening target antigens using a phage display library. The phage display libraries are composed of millions to billions of phage particles, each expressing a unique single chain variable fragment (scFv) on their viral coat. In scFv libraries, the cDNA encoding each fragment contains a similar sequence with the exception of unique sequences encoding the variable loops of the complementarity determining regions (CDRs). V_{H} domains are expressed as fusion proteins, linked to the N-terminus of the viral pIII coat protein. V_{L} domains are expressed separately and assemble with the V_{H} domain in the periplasm prior to incorporation of the complex into the viral coat. Target antigens are incubated, in vitro, with members of phage display libraries and bound phage particles are precipitated. The cDNA encoding the bound scFv is sequenced from the precipitated phage. The cDNA sequence is directly incorporated into antibody sequences for recombinant antibody production, or mutated and utilized for further optimization through in vitro affinity maturation.

### Antibodies Produced Using Affinity Maturation Techniques

[0655] scFvs capable of binding target antigens are identified using the libraries described above and high affinity mutants are derived from these through the process of affinity maturation. Affinity maturation technology is used to identify sequences encoding CDRs that have the highest affinity for the target antigen. Using this technology, the CDR sequences isolated using the phage display library selection process described above are mutated randomly as a whole or at specific residues to create millions to billions of variants. These variants are expressed in scFv fusion proteins in a phage display library and screened for their ability to bind the target antigen. Several rounds of selection, mutation and expression are carried out to identify antibody fragment sequences with the highest affinity for the target antigen. These sequences can be directly incorporated into antibody sequences for recombinant antibody production.

### Example 4

### Identification and Characterization of Antibodies Directed to Recombinant Proteins

[0656] Recombinant proteins are synthesized according to the protein expression method 1, protein expression method 2 or obtained from commercial sources. Recombinant proteins expressed include those listed in Table 20.

TABLE 20
Recombinant proteins

| Recombinant Protein | Key Features |
|---|---|
| proTGF-β1 C4S | N-terminal association blocked |
| TGF-β1 LAP C4S | LAP only |
| | N-terminal association blocked |
| proTGF-β1 complexed with | N-terminal association with LTBP1 |
| LTBP1S | splice variant |
| TGF-β1 LAP complexed | LAP only |
| with sGARP | N-terminal association with soluble |
| | GARP |
| proTGF-β1 complexed with | N-terminal association with soluble |
| sGARP | GARP |
| sGARP | |
| ICAM-l ectodomain (Ig- | Control, N- or C-terminal His tag |
| like domains 1 to 5) | |

[0657] Both human and non-human (including, but not limited to mouse) isoforms of the recombinant proteins listed in Table 20 are expressed.

[0658] Antibodies are generated according to the methods described in Example 3, which bind to recombinant proteins expressed and are subjected to screening to identify antibodies with desired binding properties. ELISA assays are used initially to identify antibody candidates that demonstrate affinity for desired antigens, while showing reduced or no affinity for undesired antigens.

### Identification of TGF-β1 GPC Stabilizing Antibodies

[0659] Antibodies are screened for their ability to stabilize TGF-β1 GPCs. Antibodies are first tested for their ability to associate with proTGF-β1. For screening, ELISA plates are prepared by coating with neutravidin followed by incubation with biotinylated human proTGF-β1 C4S (or murine proTGF-β1 C4S to identify antibodies that cross-react with murine versions) or biotinylated control proteins. Antibodies are then added to ELISA plates and binding to proTGF-β1 C4S (or biotinylated control proteins) is detected using secondary antibodies conjugated with enzymes for detection (e.g. colorimetric, fluorimetric). To identify and eliminate antibodies that bind to miscellaneous elements (e.g. polyhistidine tags, flag tags and/or 3C proteinase cleavage sites), ICAM-1 proteins comprising one or more of such miscellaneous elements are used as biotinylated control proteins. To identify antibodies that bind to TGF-β1 LAP, human TGF-β1 LAP C4S is used as a biotinylated control protein. To identify and eliminate antibodies that bind to free TGF-β1, the assay is carried out using ELISA plates that are coated directly with human TGF-β1 growth factor (no neutravidin). Based on assay results, antibodies are selected for additional rounds of selection or eliminated from testing pools.

[0660] Antibodies are further assessed for their ability to block growth factor release from TGF-β1 GPCs. Cells expressing GPCs are incubated with selected antibodies and these cells are then co-cultured with cells comprising TGF-β-responsive reporter constructs (e.g. TMCL reporter cells) as well as with cells expressing αvβ₆ integrin to detect free growth factor-dependent gene expression.

[0661] Additional assays are carried out to characterize regions of antibody recognition bound by selected antibodies as well as growth factor modulation in specific cell types (e.g. fibroblasts and/or T-cells). Finally, affinity binding estimates are made using cross blocking experiments to bin antibodies as well as through the use of affinity analysis instruments, including, but not limited to Octet® (ForteBio, Menlo Park, Calif.) family instruments. Antibodies are further selected based on their ability to stabilize alternative TGF-β GPC isoforms (e.g. TGF-β1, TGF-β2 and/or TGF-β3) and TGF-β1 GPCs from other species alone or in complexes (e.g. with sGARP, LTBP1, LTBP2, LTBP3, LTBP4).

### Identification of TGF-β1 Releasing Antibodies

[0662] Antibodies are screened for their ability to release TGF-β1 from TGF-β1 GPCs. Antibodies are first tested for ability to associate with TGF-β1 LAP. For screening, ELISA plates are prepared by coating with neutravidin followed by incubation with biotinylated human TGF-β1 LAP C4S (or murine TGF-β1 LAP C4S to identify antibodies that cross-react with murine versions) or biotinylated control proteins. Antibodies are then added to ELISA plates and binding to TGF-β1 LAP C4S (or biotinylated control proteins) is detected using secondary antibodies conjugated with enzymes for detection (e.g. colorimetric, fluorimetric). To identify and eliminate antibodies that bind to miscellaneous elements (e.g. polyhistidine tags, flag tags and/or 3C proteinase cleavage sites), ICAM-1 proteins comprising one or more of such miscellaneous elements are used as biotinylated control proteins. To identify and eliminate antibodies that bind to free TGF-β1, the assay is carried out using ELISA plates that are coated directly with human TGF-β1 growth factor (no neutravidin). Based on assay results, antibodies are selected for additional rounds of selection or eliminated from testing pools.

[0663] Antibodies are further assessed for their ability to release TGF-β1 from GPCs. Cells expressing GPCs are used in co-cultures with cells comprising TGF-β-responsive reporter constructs (e.g. TMLC reporter cells) to detect free growth factor-dependent gene expression in response to antibody treatment. Co-cultures are incubated with selected antibodies and resulting reporter activity is assessed.

[0664] Additional assays are carried out to characterize regions of antibody recognition bound by selected antibodies as well as growth factor modulation in specific cell types (e.g. fibroblasts and/or T-cells). Finally, affinity binding estimates are made using cross blocking experiments to bin antibodies as well as through the use of affinity analysis instruments, including, but not limited to Octet® (ForteBio, Menlo Park, Calif.) family instruments. Antibodies are further selected based on their ability to elevate free growth factor relative to latent growth factor with alternative TGF-β GPC isoforms (e.g. TGF-β1, TGF-β2 and/or TGF-β3) and TGF-β1 GPCs from other species alone or in complexes (e.g. with sGARP, LTBP1, LTBP2, LTBP3, LTBP4).

Identification of Antibodies Capable of Stabilizing proTGF-β1 Complexed with LTBP

[0665] Antibodies are screened for their ability to prevent growth factor release from complexes of LTBP1S and proTGF-β1. Antibodies are first assessed overall for their ability to associate with these protein complexes. ELISA plates are prepared by coating with neutravidin followed by incubation with biotinylated human proTGF-β1 complexed with human LTBP1S (or murine proTGF-β1 complexed with murine LTBP1S to identify antibodies that cross react with murine proteins) or with biotinylated control proteins. Antibodies are then added to ELISA plates and binding to protein complexes or biotinylated control proteins is detected using secondary antibodies conjugated with enzymes for detection (e.g. colorimetric, fluorimetric). To identify and eliminate antibodies that bind to miscellaneous elements (e.g. polyhistidine tags, flag tags and/or 3C proteinase cleavage sites), ICAM-1 proteins comprising one or more of such miscellaneous elements are used as biotinylated control proteins. To identify and eliminate antibodies that bind to free TGF-β1, the assay is carried out using ELISA plates that are coated directly with human TGF-β1 growth factor (no neutravidin). Based on assay results, antibodies are selected for additional rounds of selection or eliminated from testing pools.

[0666] Antibodies are further assessed for their ability to stabilize TGF-β1 GPCs against activation by αvβ₆ expressed on cells. Cells expressing GPCs are incubated with selected antibodies and these cells are then co-cultured with cells comprising TGF-β-responsive reporter constructs (e.g. TMCL reporter cells) as well as with cells expressing αvβ₆ integrin to detect free growth factor-dependent gene expression activity.

[0667] Additional assays are carried out to characterize regions of antibody recognition bound by selected antibodies as well as growth factor modulation in specific cell types (e.g. fibroblasts and/or T-cells). Finally, affinity binding estimates are made using cross blocking experiments to bin antibodies as well as through the use of affinity analysis instruments, including, but not limited to Octet® (ForteBio, Menlo Park, Calif.) family instruments. Antibodies are further selected based on their ability to stabilize alternative TGF-β GPC isoforms (e.g. TGF-β1, TGF-β2 and/or TGF-β3) and TGF-β1 GPCs from other species alone or in complexes (e.g. with sGARP, LTBP1, LTBP2, LTBP3, LTBP4).

Identification of Antibodies Capable of Releasing TGF-β1 from Complexes of GARP and proTGF-β1

[0668] Antibodies are screened for their ability to release TGF-β1 from complexes of proTGF-β1 and sGARP. Antibodies are first assessed overall for their ability to associate with TGF-β1 LAP complexed with sGARP, but not with free GARP. ELISA plates are prepared by coating with neutravidin followed by incubation with biotinylated human TGF-β1 LAP complexed with human sGARP (or murine or cyno versions of these proteins to identify cross-reacting antibodies) or with biotinylated control proteins. Antibodies are then added to ELISA plates and binding to protein complexes or biotinylated control proteins is detected using secondary antibodies conjugated with enzymes for detection (e.g. colorimetric, fluorimetric). To identify and eliminate antibodies that bind to miscellaneous elements (e.g. polyhistidine tags, flag tags and/or 3C proteinase cleavage sites), ICAM-1 proteins comprising one or more of such miscellaneous elements are used as biotinylated control proteins. To identify and eliminate antibodies that bind to free GARP, sGARP is used as a biotinylated control protein. Based on assay results, antibodies are selected for additional rounds of selection or eliminated from testing pools.

[0669] Antibodies are further assessed for their ability to release TGF-β1 from GPCs. Cells expressing GPCs are co-cultured with cells comprising TGF-β-responsive reporter constructs (e.g. TMLC reporter cells) to detect free growth factor-dependent gene expression in response to antibody treatment. Co-cultures are incubated with selected antibodies and resulting reporter activity is assessed.

[0670] Antibodies capable of releasing TGF-β1 are also tested for their ability to convert precursor cells to iTreg cells by upregulating FoxP3. FoxP3 is a transcription factor expressed in T-cells, known to be immunomodulatory. It is known to be regulated by TGF-β associated with T-cell surface GARP. Cells expressing GPCs as well as sGARP are incubated with selected antibodies and analyzed for iTreg induction and/or the treated cells (or resulting supernatants) are used in Treg suppression assays.

[0671] Additional assays are carried out to characterize regions of antibody recognition bound by selected antibodies as well as growth factor modulation in specific cell types (e.g. fibroblasts and/or T-cells). Finally, affinity binding estimates are made using cross blocking experiments to bin antibodies as well as through the use of affinity analysis instruments, including, but not limited to Octet® (ForteBio, Menlo Park, Calif.) family instruments. Antibodies are further selected based on their ability to elevate free growth factor relative to latent growth factor with alternative TGF-β GPC isoforms (e.g. TGF-β1, TGF-β2 and/or TGF-β3) and TGF-β1 GPCs from other species alone or in complexes (e.g. with sGARP, LTBP1, LTBP2, LTBP3, LTBP4).

Identification of Antibodies Capable of Stabilizing Complexes of GARP and proTGF-β1

[0672] Antibodies are screened for their ability to prevent growth factor release from complexes of sGARP and proTGF-β1. Antibodies are first assessed overall for their ability to associate with complexes of proTGF-β1 and sGARP. ELISA plates are prepared by coating with neutravidin followed by incubation with biotinylated human proTGF-β1 complexed with human sGARP (or murine or cyno versions of these proteins to identify cross-reacting antibodies) or with biotinylated control proteins. Antibodies are then added to ELISA plates and binding to protein complexes or biotinylated control proteins is detected using secondary antibodies conjugated with enzymes for detection (e.g. colorimetric, fluorimetric). To identify and eliminate antibodies that bind to miscellaneous elements (e.g. polyhistidine tags, flag tags and/or 3C proteinase cleavage sites), ICAM-1 proteins comprising one or more of such miscellaneous elements are used as biotinylated control proteins. To identify and eliminate antibodies that bind to free GARP, sGARP is used as a biotinylated control protein. Based on assay results, antibodies are selected for additional rounds of selection or eliminated from testing pools.

[0673] Antibodies are further assessed for their ability to stabilize TGF-β1 GPCs. Cells expressing GPCs are co-cultured with cells comprising TGF-β-responsive reporter constructs (e.g. TMLC reporter cells) to detect free growth factor-dependent gene expression in response to antibody treatment. Co-cultures are incubated with selected antibodies and resulting reporter activity is assessed.

[0674] Antibodies capable of releasing TGF-β1 are also tested for their ability to convert precursor cells to iTreg cells by upregulating FoxP3. FoxP3 is a transcription factor that when expressed in T-cells, is known to be immunomodulatory. FoxP3 expression is regulated by TGF-β associated with T-cell surface GARP. Cells expressing GPCs as well as GARP are incubated with selected antibodies and analyzed for iTreg induction and/or the treated cells (or resulting supernatants) are used in Treg suppression assays.

[0675] Additional assays are carried out to characterize regions of antibody recognition bound by selected antibodies as well as growth factor modulation in specific cell types (e.g. fibroblasts and/or T-cells). Finally, affinity binding estimates are made using cross blocking experiments to bin antibodies as well as through the use of affinity analysis instruments, including, but not limited to Octet® (ForteBio, Menlo Park, Calif.) family instruments. Antibodies are further selected based on their ability to stabilize alternative TGF-β GPC isoforms (e.g. TGF-β1, TGF-β2 and/or TGF-β3) and TGF-β1 GPCs from other species alone or in complexes (e.g. with sGARP, LTBP1, LTBP2, LTBP3, LTBP4).

### Example 5

### Chimeric Protein Design Using Sequence Alignments

[0676] For chimeric protein design, the alignment of TGF-β family members was constructed to identify conserved structural features and the degree of conservation of these features (FIG. 8). Comparison between N-terminal region sequences revealed higher levels of conservation among N-terminal regions of the prodomain. Based on this sequence alignment and structural features of these protein modules, a generic chimeric design strategy for TGF-β family members was adopted, such that chimeras were designed where the ARM domains are swapped (either the entire ARM domain, or subsets of the ARM domain as indicated) among family members.

[0677] Specifically, for the generation of chimeras comprising protein modules of TGF-β1, TGF-β2 and/or TGF-β3, alignment of the three was carried out using standard approaches, and these sequence alignments were used to create a homology model comparing TGF-β2 and TGF-β3 to the crystal structure of porcine TGF-β1 (Shi, M. et al., Latent TGF-beta structure and activation. Nature. 2011 Jun. 15; 474(7351):343-9). Briefly, the sequence of TGF-β2 or TGF-β3 was modeled based on the template structure and sequence alignment along with the satisfaction of standard spatial restraints using standard procedures. These three dimensional models were analyzed to visualize how proposed chimeric combinations may comprise areas of steric clash. As used herein, the term “steric clash” refers to an interaction between two or more entities and/or moieties that is disruptive to the shape and/or conformation of each entity, each moiety or an entity comprising the two or more moieties participating in the interaction. Three dimensional modeling revealed possible steric clashes between the latency loop of TGF-β2 and the mature growth factor of TGF-β1. Specifically, the TGF-β2 latency loop comprises a D-Y-P amino acid sequence, the side chains of which may overlap with regions of the TGF-β1 growth factor.

### Example 6

### TGF-β1 Chimeric Protein with TGF-β2 Trigger Loop

[0678] The activation mechanism for TGF-β2 remains to be fully understood. Activation may be dependent upon one or more associations between the TGF-β2 trigger loop and α₉β₁ integrin. To assess this mechanism of TGF-β2 activity, chimeric proteins are synthesized comprising GPCs comprising TGF-β1 wherein protein modules comprising the sequence SGRRGDLATI (SEQ ID NO:316) are substituted with protein modules comprising TGF-β2 trigger loops comprising the sequence GTSTYTSGDQKTIKSTRKK (SEQ ID NO:231) The activation mechanism of these chimeric proteins (TGF-β1^{Trigger Loop (short) β2} chimeric proteins) is tested by cell based assay. Cells (HEK293 or Sw-480 cells) are transfected with or without α₉β₁ integrin in addition to either GPCs comprising TGF-β2, GPCs comprising TGF-β1^{Trigger Loop (short) β2} and/or GPCs comprising mutant TGF-β2 (as non-active controls) wherein trigger loops comprise the mutations Y240A, D245A and/or Q246A. Reporter cell lines are used to detect growth factor release.

### Example 7

### Chimeric LAP Proteins

[0679] TGF-β chimeric LAP proteins were designed with arm regions from alternative TGF-β isoforms. These were also expressed with additional sequence elements for processing and purification. These proteins included those presented in the Table below.

TABLE 21
Chimeric LAP proteins

| | | SEQ |
|---|---|---|
| | | ID |
| Protein | Sequence | NO |
| TGF-β1 ARMβ3 #2 LAP C4S | MDMRVPAQLLGLLLLWFSGVLGDYKDDDDKHHH | 340 |
| | HHHLEVLFQGPLSTSKTIDMELVKRKRIEAIRGQIL | |
| | SKLRLASPPSQGEVPPGPLPYQVLALYNSTRELLEE | |
| | MHGEREEGCTQENTESEYYAKEIHKFDMIQGLAE | |
| | HNELAVCPKGITSKVFRFNVSSVEKNRTNLFRAEF | |
| | RVLRVPNPSSKRNEQRIELFQILRPDEHIAKQRYIG | |
| | GKNLPTRGTAEWLSFDVTDTVREWLLRRESNLGL | |
| | EISIHCPCHTFQPNGDILENIHEVMEIKFKGVDNED | |
| | DHGRGDLGRLKKQKDHHNPHLILMMIPPHRLDNP | |
| | GQGGQRKKR | |
| TGF-β1 ARMβ2 #2 LAP C4S | MDMRVPAQLLGLLLLWFSGVLGDYKDDDDKHHH | 341 |
| | HHHLEVLFQGPLSTSKTIDMELVKRKRIEAIRGQIL | |
| | SKLRLASPPSQGEVPPGPLPPEVISIYNSTRDLLQEK | |
| | ASRRAAACERERSDEEYYAKEVYKIDMPPFFPSEN | |
| | AIPPTFYRPYFRIVRFDVSAMEKNASNLVKAEFRVF | |
| | RLQNPKARVPEQRIELYQILKSKDLTSPTQRYIDSK | |
| | VVKTRAEGEWLSFDVTDAVHEWLHHKDRNLGFK | |
| | ISLHCPCCTFVPSNNYIIPNKSEELEARFAGIDGTST | |
| | YTSGDQKTIKSTRKKNSGKTPHLLLMLLPSYRLES | |
| | QQTNRRKKR | |
| TGF-β1 ARMβ3 #3 LAP C4S | MDMRVPAQLLGLLLLWFSGVLGDYKDDDDKHHH | 342 |
| | HHHLEVLFQGPLSTSKTIDMELVKRKRIEAIRGQIL | |
| | SKLRLASPPSQGEVPPGPLPEAVLALYNSTRELLEE | |
| | MHGEREEGCTQENTESEYYAKEIHKFDMIQGLAE | |
| | HNELAVCPKGITSKVFRFNVSSVEKNRTNLFRAEF | |
| | RVLRVPNPSSKRNEQRIELFQILRPDEHIAKQRYIG | |
| | GKNLPTRGTAEWLSFDVTDTVREWLLRRESNLGL | |
| | EISIHCPCHTFQPNGDILENIHEVMEIKFKGVDNED | |
| | DHGRGDLGRLKKQKDHHNPHLILMMIPPHRLDNP | |
| | GQGGQRKKR | |
| TGF-β1 ARMβ2 #3 LAP C4S | MDMRVPAQLLGLLLLWFSGVLGDYKDDDDKHHH | 343 |
| | HHHLEVLFQGPLSTSKTIDMELVKRKRIEAIRGQIL | |
| | SKLRLASPPSQGEVPPGPLPEAVISIYNSTRDLLQEK | |
| | ASRRAAACERERSDEEYYAKEVYKIDMPPFFPSEN | |
| | AIPPTFYRPYFRIVRFDVSAMEKNASNLVKAEFRVF | |
| | RLQNPKARVPEQRIELYQILKSKDLTSPTQRYIDSK | |
| | VVKTRAEGEWLSFDVTDAVHEWLHHKDRNLGFK | |
| | ISLHCPCCTFVPSNNYIIPNKSEELEARFAGIDGTST | |
| | YTSGDQKTIKSTRKKNSGKTPHLLLMLLPSYRLES | |
| | QQTNRRKKR | |
| TGF-β3 ARMβ1 #3 LAP C7S | MDMRVPAQLLGLLLLWFSGVLGDYKDDDDKHHH | 344 |
| | HHHLEVLFQGPSLSLSTSTTLDFGHIKKKRVEAIRG | |
| | QILSKLRLTSPPEPTVMTHVPYQVLALYNSTRDRV | |
| | AGESAEPEPEPEADYYAKEVTRVLMVETHNEIYD | |
| | KFKQSTHSIYMFFNTSELREAVPEPVLLSRAELRLL | |
| | RLKLKVEQHVELYQKYSNNSWRYLSNRLLAPSDS | |
| | PEWLSFDVTGVVRQWLSRGGEIEGFRLSAHCSCDS | |
| | RDNTLQVDINGFTTGRRGDLATIHGMNRPFLLLM | |
| | ATPLERAQHLQSSRHRR | |
| TGF-β3 ARMβ2 #3 LAP C7S | MDMRVPAQLLGLLLLWFSGVLGDYKDDDDKHHH | 345 |
| | HHHLEVLFQGPSLSLSTSTTLDFGHIKKKRVEAIRG | |
| | QILSKLRLTSPPEPTVMTHVPYQVISIYNSTRDLLQE | |
| | KASRRAAACERERSDEEYYAKEVYKIDMPPFFPSE | |
| | NAIPPTFYRPYFRIVRFDVSAMEKNASNLVKAEFR | |
| | VFRLQNPKARVPEQRIELYQILKSKDLTSPTQRYID | |
| | SKVVKTRAEGEWLSFDVTDAVHEWLHHKDRNLG | |
| | FKISLHCPCCTFVPSNNYIIPNKSEELEARFAGIDGT | |
| | STYTSGDQKTIKSTRKKNSGKTPHLLLMLLPSYRL | |
| | ESQQTNRRKKR | |
| TGF-β2 ARMβ1 #3 LAP C5S | MDMRVPAQLLGLLLLWFSGVLGDYKDDDDKHHH | 346 |
| | HHHLEVLFQGPSLSTSSTLDMDQFMRKRIEAIRGQI | |
| | LSKLKLTSPPEDYPEPEEVPPEVLALYNSTRDRVAG | |
| | ESAEPEPEPEADYYAKEVTRVLMVETHNEIYDKFK | |
| | QSTHSIYMFFNTSELREAVPEPVLLSRAELRLLRLK | |
| | LKVEQHVELYQKYSNNSWRYLSNRLLAPSDSPEW | |
| | LSFDVTGVVRQWLSRGGEIEGFRLSAHCSCDSRDN | |
| | TLQVDINGFTTGRRGDLATIHGMNRPFLLLMATPL | |
| | ERAQHLQSSRHRR | |
| TGF-β2 ARMβ3 #3 LAP C5S | MDMRVPAQLLGLLLLWFSGVLGDYKDDDDKHHH | 347 |
| | HHHLEVLFQGPSLSTSSTLDMDQFMRKRIEAIRGQI | |
| | LSKLKLTSPPEDYPEPEEVPPEVLALYNSTRELLEE | |
| | MHGEREEGCTQENTESEYYAKEIHKFDMIQGLAE | |
| | HNELAVCPKGITSKVFRFNVSSVEKNRTNLFRAEF | |
| | RVLRVPNPSSKRNEQRIELFQILRPDEHIAKQRYIG | |
| | GKNLPTRGTAEWLSFDVTDTVREWLLRRESNLGL | |
| | EISIHCPCHTFQPNGDILENIHEVMEIKFKGVDNED | |
| | DHGRGDLGRLKKQKDHHNPHLILMMIPPHRLDNP | |
| | GQGGQRKKR | |
| TGF-β1 ARMβ2 #4 LAP C4S | MDMRVPAQLLGLLLLWFSGVLGDYKDDDDKHHH | 348 |
| | HHHLEVLFQGPLSTSKTIDMELVKRKRIEAIRGQIL | |
| | SKLRLASPPSQGEVPPGPLPEAVLALYNSTRDLLQE | |
| | KASRRAAACERERSDEEYYAKEVYKIDMPPFFPSE | |
| | NAIPPTFYRPYFRIVRFDVSAMEKNASNLVKAEFR | |
| | VFRLQNPKARVPEQRIELYQILKSKDLTSPTQRYID | |
| | SKVVKTRAEGEWLSFDVTDAVHEWLHHKDRNLG | |
| | FKISLHCPCCTFVPSNNYIIPNKSEELEARFAGIDGT | |
| | STYTSGDQKTIKSTRKKNSGKTPHLLLMLLPSYRL | |
| | ESQQTNRRKKR | |
| TGF-β1 ARMβ3 #4 LAP C4S | MDMRVPAQLLGLLLLWFSGVLGDYKDDDDKHHH | 349 |
| | HHHLEVLFQGPLSTSKTIDMELVKRKRIEAIRGQIL | |
| | SKLRLASPPSQGEVPPGPLPEAVLALYNSTRDLLEE | |
| | MHGEREEGCTQENTESEYYAKEIHKFDMIQGLAE | |
| | HNELAVCPKGITSKVFRFNVSSVEKNRTNLFRAEF | |
| | RVLRVPNPSSKRNEQRIELFQILRPDEHIAKQRYIG | |
| | GKNLPTRGTAEWLSFDVTDTVREWLLRRESNLGL | |
| | EISIHCPCHTFQPNGDILENIHEVMEIKFKGVDNED | |
| | DHGRGDLGRLKKQKDHHNPHLILMMIPPHRLDNP | |
| | GQGGQRKKR | |
| TGF-β3 ARMβ1 #4 LAP C7S | MDMRVPAQLLGLLLLWFSGVLGDYKDDDDKHHH | 350 |
| | HHHLEVLFQGPSLSLSTSTTLDFGHIKKKRVEAIRG | |
| | QILSKLRLTSPPEPTVMTHVPYQVLALYNSTRERV | |
| | AGESAEPEPEPEADYYAKEVTRVLMVETHNEIYD | |
| | KFKQSTHSIYMFFNTSELREAVPEPVLLSRAELRLL | |
| | RLKLKVEQHVELYQKYSNNSWRYLSNRLLAPSDS | |
| | PEWLSFDVTGVVRQWLSRGGEIEGFRLSAHCSCDS | |
| | RDNTLQVDINGFTTGRRGDLATIHGMNRPFLLLM | |
| | ATPLERAQHLQSSRHRR | |
| TGF-β3 ARMβ2 #4 LAP C7S | MDMRVPAQLLGLLLLWFSGVLGDYKDDDDKHHH | 351 |
| | HHHLEVLFQGPSLSLSTSTTLDFGHIKKKRVEAIRG | |
| | QILSKLRLTSPPEPTVMTHVPYQVLALYNSTRELLQ | |
| | EKASRRAAACERERSDEEYYAKEVYKIDMPPFFPS | |
| | ENAIPPTFYRPYFRIVRFDVSAMEKNASNLVKAEF | |
| | RVFRLQNPKARVPEQRIELYQILKSKDLTSPTQRYI | |
| | DSKVVKTRAEGEWLSFDVTDAVHEWLHHKDRNL | |
| | GFKISLHCPCCTFVPSNNYIIPNKSEELEARFAGIDG | |
| | TSTYTSGDQKTIKSTR | |
| | KKNSGKTPHLLLMLLPSYRLESQQTNRRKKR | |
| TGF-β2 ARMβ1 #4 LAP C5S | MDMRVPAQLLGLLLLWFSGVLGDYKDDDDKHHH | 352 |
| | HHHLEVLFQGPSLSTSSTLDMDQFMRKRIEAIRGQI | |
| | LSKLKLTSPPEDYPEPEEVPPEVISIYNSTRDRVAGE | |
| | SAEPEPEPEADYYAKEVTRVLMVETHNEIYDKFKQ | |
| | STHSIYMFFNTSELREAVPEPVLLSRAELRLLRLKL | |
| | KVEQHVELYQKYSNNSWRYLSNRLLAPSDSPEWL | |
| | SFDVTGVVRQWLSRGGEIEGFRLSAHCSCDSRDNT | |
| | LQVDINGFTTGRRGDLATIHGMNRPFLLLMATPLE | |
| | RAQHLQSSRHRR | |
| TGF-β2 ARMβ3 #4 LAP C5S | MDMRVPAQLLGLLLLWFSGVLGDYKDDDDKHHH | 353 |
| | HHHLEVLFQGPSLSTSSTLDMDQFMRKRIEAIRGQI | |
| | LSKLKLTSPPEDYPEPEEVPPEVISIYNSTRDLLEEM | |
| | HGEREEGCTQENTESEYYAKEIHKFDMIQGLAEHN | |
| | ELAVCPKGITSKVFRFNVSSVEKNRTNLFRAEFRV | |
| | LRVPNPSSKRNEQRIELFQILRPDEHIAKQRYIGGK | |
| | NLPTRGTAEWLSFDVTDTVREWLLRRESNLGLEISI | |
| | HCPCHTFQPNGDILENIHEVMEIKFKGVDNEDDHG | |
| | RGDLGRLKKQKDHHNPHLILMMIPPHRLDNPGQG | |
| | GQRKKR | |

### Example 8

### Assessment of α9β1-TGF-β2 Binding and Growth Factor Release

[0680] Binding between α₉β₁ and TGF-β2 as well as subsequent growth factor release is not well understood in the art. If the residues involved in this association can be elucidated, antibodies designed to disrupt α₉β₁-TGF-β2 association may be developed and used to specifically target TGF-β2 growth factor release.

[0681] Mutant constructs as well as chimeras comprising altered forms of TGF-β2 are tested by activation assay so that the α₉β₁ binding site on TGF-β2 may be mapped. This is done by generating TGF-β1/TGF-β2 chimeras with deletion and/or mutation of amino acid residues in or around the trigger loop (in some embodiments, comprising the amino acid sequence FAGIDGTSTYTSGDQKTIKSTRKKNSGKTP; SEQ ID NO: 66) or with residue-specific mutations to alanine. In some cases, TGF-β1 or TGF-β3 may or may not serve as negative controls for α₉β₁ binding. In some embodiments, recombinant proteins used for α₉β₁ binding site mapping may include those listed in Table 22. These include proTGF-β2-M1, proTGF-β2-M2, proTGF-β2-M3, proTGF-β2-M4 and proTGF-β2-M5 comprising amino acid deletions within the trigger loop. Also included is proTGF-β2-M6 comprising mutation of two residues, Ile-Asp, to Phe-Thr. Finally, a chimeric protein is included which comprises TGF-β2 wherein a portion of the trigger loop has been substituted with a portion of the trigger loop from TGF-β1.

TABLE 22
Recombinant protein for α9β1 binding site mapping

| | | SEQ |
|---|---|---|
| Recombinant | | ID |
| Protein | Key Features | NO |
| TGF-β2 | SLSTCSTLDMDQFMRKRIEAIRGQILSKLKLTSPPEDYPEPEE | 2 |
| | VPPEVISIYNSTRDLLQEKASRRAAACERERSDEEYYAKEVY | |
| | KIDMPPFFPSENAIPPTFYRPYFRIVRFDVSAMEKNASNLVKA | |
| | EFRVFRLQNPKARVPEQRIELYQILKSKDLTSPTQRYIDSKVV | |
| | KTRAEGEWLSFDVTDAVHEWLHHKDRNLGFKISLHCPCCTF | |
| | VPSNNYIIPNKSEELEARFAGIDGTSTYTSGDQKTIKSTRKKN | |
| | SGKTPHLLLMLLPSYRLESQQTNRRKKRALDAAYCFRNVQD | |
| | NCCLRPLYIDFKRDLGWKWIHEPKGYNANFCAGACPYLWSS | |
| | DTQHSRVLSLYNTINPEASASPCCVSQDLEPLTILYYIGKTPKI | |
| | EQLSNMIVKSCKCS | |
| proTGF-β2-M1 | SLSTCSTLDMDQFMRKRIEAIRGQILSKLKLTSPPEDYPEPEE | 354 |
| | VPPEVISIYNSTRDLLQEKASRRAAACERERSDEEYYAKEVY | |
| | KIDMPPFFPSENAIPPTFYRPYFRIVRFDVSAMEKNASNLVKA | |
| | EFRVFRLQNPKARVPEQRIELYQILKSKDLTSPTQRYIDSKVV | |
| | KTRAEGEWLSFDVTDAVHEWLHHKDRNLGFKISLHCPCCTF | |
| | VPSNNYIIPNKSEELEARFYTSGDQKTIKSTRKKNSGKTPHLL | |
| | LMLLPSYRLESQQTNRRKKRALDAAYCFRNVQDNCCLRPLY | |
| | IDFKRDLGWKWIHEPKGYNANFCAGACPYLWSSDTQHSRV | |
| | LSLYNTINPEASASPCCVSQDLEPLTILYYIGKTPKIEQLSNMI | |
| | VKSCKCS | |
| proTGF-β2-M2 | SLSTCSTLDMDQFMRKRIEAIRGQILSKLKLTSPPEDYPEPEE | 355 |
| | VPPEVISIYNSTRDLLQEKASRRAAACERERSDEEYYAKEVY | |
| | KIDMPPFFPSENAIPPTFYRPYFRIVRFDVSAMEKNASNLVKA | |
| | EFRVFRLQNPKARVPEQRIELYQILKSKDLTSPTQRYIDSKVV | |
| | KTRAEGEWLSFDVTDAVHEWLHHKDRNLGFKISLHCPCCTF | |
| | VPSNNYIIPNKSEELEARFAGIDGTSTIKSTRKKNSGKTPHLLL | |
| | MLLPSYRLESQQTNRRKKRALDAAYCFRNVQDNCCLRPLYI | |
| | DFKRDLGWKWIHEPKGYNANFCAGACPYLWSSDTQHSRVL | |
| | SLYNTINPEASASPCCVSQDLEPLTILYYIGKTPKIEQLSNMIV | |
| | KSCKCS | |
| proTGF-β2-M3 | SLSTCSTLDMDQFMRKRIEAIRGQILSKLKLTSPPEDYPEPEE | 356 |
| | VPPEVISIYNSTRDLLQEKASRRAAACERERSDEEYYAKEVY | |
| | KIDMPPFFPSENAIPPTFYRPYFRIVRFDVSAMEKNASNLVKA | |
| | EFRVFRLQNPKARVPEQRIELYQILKSKDLTSPTQRYIDSKVV | |
| | KTRAEGEWLSFDVTDAVHEWLHHKDRNLGFKISLHCPCCTF | |
| | VPSNNYIIPNKSEELEARFAGIDGTSTYTSGDQKTSGKTPHLL | |
| | LMLLPSYRLESQQTNRRKKRALDAAYCFRNVQDNCCLRPLY | |
| | IDFKRDLGWKWIHEPKGYNANFCAGACPYLWSSDTQHSRV | |
| | LSLYNTINPEASASPCCVSQDLEPLTILYYIGKTPKIEQLSNMI | |
| | VKSCKCS | |
| proTGF-β2-M4 | SLSTCSTLDMDQFMRKRIEAIRGQILSKLKLTSPPEDYPEPEE | 357 |
| | VPPEVISIYNSTRDLLQEKASRRAAACERERSDEEYYAKEVY | |
| | KIDMPPFFPSENAIPPTFYRPYFRIVRFDVSAMEKNASNLVKA | |
| | EFRVFRLQNPKARVPEQRIELYQILKSKDLTSPTQRYIDSKVV | |
| | KTRAEGEWLSFDVTDAVHEWLHHKDRNLGFKISLHCPCCTF | |
| | VPSNNYIIPNKSEELEARFAGIDGTSTYTSGDQKTIKSTRKKN | |
| | PHLLLMLLPSYRLESQQTNRRKKRALDAAYCFRNVQDNCCL | |
| | RPLYIDFKRDLGWKWIHEPKGYNANFCAGACPYLWSSDTQ | |
| | HSRVLSLYNTINPEASASPCCVSQDLEPLTILYYIGKTPKIEQL | |
| | SNMIVKSCKCS | |
| proTGF-β2-M5 | SLSTCSTLDMDQFMRKRIEAIRGQILSKLKLTSPPEDYPEPEE | 358 |
| | VPPEVISIYNSTRDLLQEKASRRAAACERERSDEEYYAKEVY | |
| | KIDMPPFFPSENAIPPTFYRPYFRIVRFDVSAMEKNASNLVKA | |
| | EFRVFRLQNPKARVPEQRIELYQILKSKDLTSPTQRYIDSKVV | |
| | KTRAEGEWLSFDVTDAVHEWLHHKDRNLGFKISLHCPCCTF | |
| | VPSNNYIIPNKSEELEARFGTSTYTSGDQKTIKSTRKKNSGKT | |
| | PHLLLMLLPSYRLESQQTNRRKKRALDAAYCFRNVQDNCCL | |
| | RPLYIDFKRDLGWKWIHEPKGYNANFCAGACPYLWSSDTQ | |
| | HSRVLSLYNTINPEASASPCCVSQDLEPLTILYYIGKTPKIEQL | |
| | SNMIVKSCKCS | |
| proTGF-β2-M6 | SLSTCSTLDMDQFMRKRIEAIRGQILSKLKLTSPPEDYPEPEE | 359 |
| | VPPEVISIYNSTRDLLQEKASRRAAACERERSDEEYYAKEVY | |
| | KIDMPPFFPSENAIPPTFYRPYFRIVRFDVSAMEKNASNLVKA | |
| | EFRVFRLQNPKARVPEQRIELYQILKSKDLTSPTQRYIDSKVV | |
| | KTRAEGEWLSFDVTDAVHEWLHHKDRNLGFKISLHCPCCTF | |
| | VPSNNYIIPNKSEELEARFAGFTGTSTYTSGDQKTIKSTRKKN | |
| | SGKTPHLLLMLLPSYRLESQQTNRRKKRALDAAYCFRNVQD | |
| | NCCLRPLYIDFKRDLGWKWIHEPKGYNANFCAGACPYLWSS | |
| | DTQHSRVLSLYNTINPEASASPCCVSQDLEPLTILYYIGKTPKI | |
| | EQLSNMIVKSCKCS | |
| proTGF-β2^{RGDβ1} | SLSTCSTLDMDQFMRKRIEAIRGQILSKLKLTSPPEDYPEPEE | 360 |
| | VPPEVISIYNSTRDLLQEKASRRAAACERERSDEEYYAKEVY | |
| | KIDMPPFFPSENAIPPTFYRPYFRIVRFDVSAMEKNASNLVKA | |
| | EFRVFRLQNPKARVPEQRIELYQILKSKDLTSPTQRYIDSKVV | |
| | KTRAEGEWLSFDVTDAVHEWLHHKDRNLGFKISLHCPCCTF | |
| | VPSNNYIIPNKSEELEARFAGIDTGRRGDLATINSGKTPHLLL | |
| | MLLPSYRLESQQTNRRKKRALDAAYCFRNVQDNCCLRPLYI | |
| | DFKRDLGWKWIHEPKGYNANFCAGACPYLWSSDTQHSRVL | |
| | SLYNTINPEASASPCCVSQDLEPLTILYYIGKTPKIEQLSNMIV | |
| | KSCKCS | |

[0682] The activation mechanism of these recombinant proteins is tested by cell based assay. Cells (HEK293 or Sw-480 cells) are transfected with or without α₉β₁ integrin in addition to either GPCs comprising TGF-β2, GPCs comprising alanine substitution mutations for each residue in the trigger loop (wherein each GPC tested comprises a single substitution), one of the recombinant proteins listed in Table 22 and/or GPCs comprising inactive mutants of TGF-β2 (as non-active controls). Reporter cell lines are used to detect growth factor release in media samples taken from the transfected cells. Results are used to determine which residues within the trigger loop are necessary for α₉β₁-dependent TGF-β2 growth factor release.

### Example 9

### Sequence Alignment

[0683] A multiple sequence alignment of TGF-β family members was adapted from Shi et. al. 2011 (Shi, M. et al., Latent TGF-beta structure and activation. Nature. 2011 Jun. 15; 474(7351):343-9). The sequences of human TGF-β1, TGF-β2, TGF-β3, GDF-11, Inhibin Beta A, Inhibin Alpha A, BMP9, BMP2, BMP4, BMP7, BMP6, BMP8A, Lefty1, and murine TGF-β1, GDF11, GDF8 and cynomolgous monkey TGF-β1, and GDF8 were added to the alignment using standard methods, and the sequences included the full-length proteins (excluding signal peptide sequences) (FIG. 8).

### Example 10

### Myostatin Proliferation Assay

[0684] C₂C₁₂ murine myoblasts (ATCC, Manassas, Va.) are cultured in Dulbecco's modified essential medium (DMEM; Life Technologies, Carlsbad, Calif.) with 10% fetal bovine serum (FBS; Life Technologies, Carlsbad, Calif.) prior to carrying out the assay. The percentage of FBS is varied and/or replaced with bovine serum albumin (BSA) at varying concentrations. Cell proliferation assays are conducted in uncoated 96-well plates. C₂C₁₂ cultures are seeded at 1000 cells per well. After allowing the cells to attach for 16 hours, myostatin test media is added. Recombinant human myostatin (R&D Systems, Minneapolis, Minn.) is used for standard curve generation. For experimental systems, the supernatant from 293E cells overexpressing myostatin is added, following treatment with experimental antibodies. All samples are run in replicates of 8. Plates are incubated for 72 hours in an atmosphere of 37° C. and 5% CO₂. Proliferation is assessed using a CellTiter-Glo® Luminescent Cell Viability Assay (Promega BioSciences, LLC, Madison, Wis.) whereby cell lysis generates a luminescent signal proportional to the amount of ATP present, which is directly proportional to the number of cells present in culture (Thomas, M. et al., Myostatin, a negative regulator of muscle growth, functions by inhibiting myoblast proliferation. 2000. 275(51):40235-43).

### Example 11

### GPC Immobilization by Biotinylation and Detection of Integrin-Mediated Growth Factor Release

[0685] Recombinant GPCs of the present invention are N-terminally biotinylated and incubated on streptavidin/avidin-coated culture surfaces. Cells expressing various integrins are added to the cell culture surfaces and cultured for 24 hours. Media are removed and added to growth factor reporter cell cultures that express luciferase in response to growth factor activity. After 24 hours, cells are washed, lysed and analyzed for luciferase activity.

### Example 12

### Protein Purification by Ni-NTA

[0686] Cells (293-6E cells) expressing His-tagged proteins are cultured in serum-free medium (FreeStyle F17 medium, Life Technologies, Carlsbad, Calif.) supplemented with 4 mM glutamine, 0.1% Pluronic F68 and 25 μg/ml G418. Once their viability drops below 50%, tissue culture supernatant is collected and cleared by centrifugation for 10 minutes at 200× gravity at 4° C. Supernatant is then filtered by passing it through a 0.22 or 0.45 μm pore filter. Filtered supernatant is combined with Tris, NaCl and NiCl₂ for a final concentration of 50 mM Tris pH 8.0, 500 mM NaCl and 0.5 mM NiCl₂. 1 ml of the adjusted solution is collected for later analysis by SDS-poly acrylamide gel electrophoresis (PAGE) or Western blot, while another portion of the adjusted solution is combined with washed Ni-NTA resin (Life Technologies, Carlsbad, Calif.) at a concentration of 5-10 ml of Ni-NTA resin per 300 ml of the adjusted solution. This combined solution is then stirred at 4° C. using a suspended magnetic stir bar (to prevent grinding of Ni-NTA agarose). Ni-NTA resin is next collected by centrifugation at 200× gravity at 4° C. for 10 minutes.

[0687] Next, the column is washed with 15 column volumes (CV) of wash buffer (20 mM Tris, pH 8.0, 500 mM NaCl and 20 mM imidazole). An aliquot of the last wash is collected for analysis. The column is then eluted with 3 CV of elution buffer (20 mM Tris, pH 8.0, 500 mM NaCl and 300 mM imidazole) and 1/3 column volume fractions are collected for analysis.

[0688] The absorbance at 280 nm is measured in each of the eluted fractions collected and compared to the absorbance at 280 nm of blank elution buffer. Earlier fractions typically have negative absorption due to the imidazole gradient; however, fractions containing higher amounts of protein have positive values. Collected fractions are then run on SDS-PAGE for analysis and relevant fractions are pooled for further purification.

### Example 13

### Design of GDF-8/GDF-11/Activin Chimeras

[0689] The structure-based alignment of TGF-β family members was used to construct three-dimensional models of potential chimeric proteins comprising combinations of modules from GDF-8 and GDF-11 using the Schrodinger Bioluminate software. A chimeric model of GDF-8 comprising an arm region of GDF-11 (SEQ ID NO:276) revealed a region of potential steric clash involving GDF-11 residue F95. According to the model, F95 from the GDF-11 arm causes destabilization of the α2 helix of the chimeric GPC. Therefore, GDF8/GDF11/Activin chimeras were designed so that the ARM region of the chimera contains the α2 helix.

### Example 14

### Expression of TGF-β1 Complexes and Protein Analysis

[0690] proTGF-β1 expression was carried out with or without His-tagged LTBP1S or sGARP according to protein expression method 1 or protein expression method 2, described previously. proTGF-β1 expressed without LTBP1S or sGARP comprised C4S mutation (to prevent misfolding of the protein) and an N-terminal His tag. Purified proteins were analyzed by SDS-PAGE under either reducing or non-reducing conditions (to maintain protein dimers or complexes). FIG. 11 depicts the results indicating successful expression of these proteins and protein complexes.

### Example 15

### Cell-Based Antigen Expression of Complexes of sGARP and TGF-β1

[0691] Pro B-cell lymphoma cell lines were developed that stably express either (membrane-bound) GARP and proTGF-β1 or GARP and TGF-β1 LAP. Membrane-associated GARP was cloned into pYD7 vector (NRC Canada, Ottawa, CA) while proTGF-β1 and TGF-β1 LAP were cloned into pcDNA3.1 vectors (Life Technologies, Carlsbad, Calif.). These vectors allow for blasticidin and G418-based selection, respectively. Pre-B-cell lymphoma-derived cells from BALB/c swiss mice (referred to herein as 300.19 cells) were transfected with empty vector control or GARP with coexpression of either proTGF-β1 or TGF-β1 LAP and selected with G418 plus blasticidin. Resistant cells were subcloned and single colonies were selected. Cells cultured from resulting cell lines were probed with antibodies (conjugated with fluorescent particles) directed to expressed proteins and examined by flow cytometry for fluorescence intensity. FIG. 12 displays fluorescence intensity data collected from resulting cells. Baseline values associated with cells transfected with empty vector control are shown in FIG. 12A, while elevated fluorescence intensity in FIGS. 12B and 12C indicate cell surface expression of GARP complexes. Quantification of surface-expressed proteins was carried out through additional analyses in which the same fluorescently labeled cells used to generate the data depicted in FIG. 12, were examined by flow cytometry alongside beads with defined antibody binding capacity for the generation of a standard curve. These beads were labeled with the same antibodies used for labeling cells and fluorescence values obtained were used to extrapolate the number of antibodies bound to surface expressed proteins. 300.19 cells expressing proTGF-β1-GARP were determined to express about 83,000 copies/cell, while 300.19 cells expressing TGF-β1 LAP complexed with GARP were determined to express about 66,000 copies/cell.

[0692] Cell lines were next tested for TGF-β1 activity in the presence of cells expressing αᵥβ₆ integrins, known to release TGF-β1 growth factor from latent GPCs. Conditioned media from these co-cultures was used to treat reporter cells comprising TGF-β receptors as well as the luciferase gene, driven by a TGF-β-responsive promoter, PAI-1. This was done in the presence or absence of a neutralizing antibody, anti-TGF-β, clone 1D11. Resulting luciferase activity was assessed by luminometry. Results indicate that conditioned media from cells expressing empty vectors and complexes of GARP and TGF-β1 LAP were unable to induce luciferase expression when compared to baseline values, while conditioned media from cells expressing proTGF-β1 complexed with sGARP displayed an enhanced ability to induce luciferase expression (see FIG. 12D).

### Example 16

### Cell-Based Antigen Expression of Complexes of LTBP1 and proTGF-β1

[0693] NIH 3T3 mouse fibroblasts are developed that stably express complexes of LTBP1 and proTGF-β1. These secreted proteins bind to the cell surface or are deposited in the extracellular matrix.

### Example 17

### GASP Constructs

[0694] GASP constructs were designed using fragments from published sequences. Constructs were designed with various combinations of signal sequences, 3C protease cleavage sites, histidine tags and biotinylation sequences. The designed constructs include those listed in Table 23.

TABLE 23
GASP constructs

| | | SEQ |
|---|---|---|
| | | ID |
| Protein | Sequence | NO |
| GASP1 construct | MDMRVPAQLLGLLLLWFSGVLGSVVRGHQAAAT | 361 |
| with residue 303-576 | SESSPNGTAFPAAECLKPPDSEDCGEEQTRWHFD | |
| of | AQANNCLTFTFGHCHRNLNHFETYEACMLACMS | |
| NP_783165.1 | GPLAACSLPALQGPCKAYAPRWAYNSQTGQCQS | |
| | FVYGGCEGNGNNFESREACEESCPFPRGNQRCRA | |
| | CKPRQKLVTSFCRSDFVILGRVSELTEEPDSGRAL | |
| | VTVDEVLKDEKMGLKFLGQEPLEVTLLHVDWAC | |
| | PCPNVTVSEMPLIIMGEVDGGMAMLRPDSFVGAS | |
| | SARRVRKLREVMHKKTCDVLKEFLGLHLEVLFQ | |
| | GPHHHHHHGLNDIFEAQKIEWHE | |
| GASP1 construct | MDMRVPAQLLGLLLLWFSGVLGLPPIRYSHAGIC | 362 |
| with residue 35-576 | PNDMNPNLWVDAQSTCRRECETDQECETYEKCC | |
| of | PNVCGTKSCVAARYMDVKGKKGPVGMPKEATC | |
| NP_783165.1 | DHFMCLQQGSECDIWDGQPVCKCKDRCEKEPSFT | |
| | CASDGLTYYNRCYMDAEACSKGITLAVVTCRYH | |
| | FTWPNTSPPPPETTMHPTTASPETPELDMAAPALL | |
| | NNPVHQSVTMGETVSFLCDVVGRPRPEITWEKQL | |
| | EDRENVVMRPNHVRGNVVVTNIAQLVIYNAQLQ | |
| | DAGIYTCTARNVAGVLRADFPLSVVRGHQAAATS | |
| | ESSPNGTAFPAAECLKPPDSEDCGEEQTRWHFDA | |
| | QANNCLTFTFGHCHRNLNHFETYEACMLACMSG | |
| | PLAACSLPALQGPCKAYAPRWAYNSQTGQCQSF | |
| | VYGGCEGNGNNFESREACEESCPFPRGNQRCRAC | |
| | KPRQKLVTSFCRSDFVILGRVSELTEEPDSGRALV | |
| | TVDEVLKDEKMGLKFLGQEPLEVTLLHVDWACP | |
| | CPNVTVSEMPLIIMGEVDGGMAMLRPDSFVGASS | |
| | ARRVRKLREVMHKKTCDVLKEFLGLHLEVLFQG | |
| | PHHHHHHGLNDIFEAQKIEWHE | |
| GASP1 construct | MDMRVPAQLLGLLLLWFSGVLGGLNDIFEAQKIE | 363 |
| with residue 384-576 | WHEHHHHHHLEVLFQGPAACSLPALQGPCKAYA | |
| of | PRWAYNSQTGQCQSFVYGGCEGNGNNFESREAC | |
| NP_783165.1 | EESCPFPRGNQRCRACKPRQKLVTSFCRSDFVILG | |
| | RVSELTEEPDSGRALVTVDEVLKDEKMGLKFLGQ | |
| | EPLEVTLLHVDWACPCPNVTVSEMPLIIMGEVDG | |
| | GMAMLRPDSFVGASSARRVRKLREVMHKKTCDV | |
| | LKEFLGLH | |
| GASP1 construct | MDMRVPAQLLGLLLLWFSGVLGFPRGNQRCRAC | 364 |
| with residue 438-576 | KPRQKLVTSFCRSDFVILGRVSELTEEPDSGRALV | |
| of | TVDEVLKDEKMGLKFLGQEPLEVTLLHVDWACP | |
| NP_783165.1 | CPNVTVSEMPLIIMGEVDGGMAMLRPDSFVGASS | |
| | ARRVRKLREVMHKKTCDVLKEFLGLHLEVLFQG | |
| | PHHHHHHGLNDIFEAQKIEWHE | |
| GASP construct | MDMRVPAQLLGLLLLWFSGVLGSVVQREPARDA | 365 |
| with residue 279-548 | APSIPAPAECLPDVQACTGPTSPHLVLWHYDPQR | |
| of | GGCMTFPARGCDGAARGFETYEACQQACARGPG | |
| NP_444514.1 | DACVLPAVQGPCRGWEPRWAYSPLLQQCHPFVY | |
| | GGCEGNGNNFHSRESCEDACPVPRTPPCRACRLR | |
| | SKLALSLCRSDFAIVGRLTEVLEEPEAAGGIARVA | |
| | LEDVLKDDKMGLKFLGTKYLEVTLSGMDWACPC | |
| | PNMTAGDGPLVIMGEVRDGVAVLDAGSYVRAAS | |
| | EKRVKKILELLEKQACELLNRFQDLEVLFQGPHH | |
| | HHHHGLNDIFEAQKIEWHE | |
| GASP construct | MDMRVPAQLLGLLLLWFSGVLGAGLLPGLGSHP | 366 |
| with residue 20-548 | GVCPNQLSPNLWVDAQSTCERECSRDQDCAAAE | |
| of | KCCINVCGLHSCVAARFPGSPAAPTTAASCEGFVC | |
| NP_444514.1 | PQQGSDCDIWDGQPVCRCRDRCEKEPSFTCASDG | |
| | LTYYNRCYMDAEACLRGLHLHIVPCKHVLSWPPS | |
| | SPGPPETTARPTPGAAPVPPALYSSPSPQAVQVGG | |
| | TASLHCDVSGRPPPAVTWEKQSHQRENLIMRPDQ | |
| | MYGNVVVTSIGQLVLYNARPEDAGLYTCTARNA | |
| | AGLLRADFPLSVVQREPARDAAPSIPAPAECLPDV | |
| | QACTGPTSPHLVLWHYDPQRGGCMTFPARGCDG | |
| | AARGFETYEACQQACARGPGDACVLPAVQGPCR | |
| | GWEPRWAYSPLLQQCHPFVYGGCEGNGNNFHSR | |
| | ESCEDACPVPRTPPCRACRLRSKLALSLCRSDFAI | |
| | VGRLTEVLEEPEAAGGIARVALEDVLKDDKMGL | |
| | KFLGTKYLEVTLSGMDWACPCPNMTAGDGPLVI | |
| | MGEVRDGVAVLDAGSYVRAASEKRVKKILELLE | |
| | KQACELLNRFQDLEVLFQGPHHHHHHGLNDIFEA | |
| | QKIEWHE | |
| GASP construct | MDMRVPAQLLGLLLLWFSGVLGGLNDIFEAQKIE | 367 |
| with residue 357-548 | WHEHHHHHHLEVLFQGPDACVLPAVQGPCRGW | |
| of | EPRWAYSPLLQQCHPFVYGGCEGNGNNFHSRESC | |
| NP_444514.1 | EDACPVPRTPPCRACRLRSKLALSLCRSDFAIVGR | |
| | LTEVLEEPEAAGGIARVALEDVLKDDKMGLKFLG | |
| | TKYLEVTLSGMDWACPCPNMTAGDGPLVIMGEV | |
| | RDGVAVLDAGSYVRAASEKRVKKILELLEKQACE | |
| | LLNRFQD | |
| GASP construct | MDMRVPAQLLGLLLLWFSGVLGVPRTPPCRACR | 368 |
| with residue 411-548 | LRSKLALSLCRSDFAIVGRLTEVLEEPEAAGGIAR | |
| of | VALEDVLKDDKMGLKFLGTKYLEVTLSGMDWA | |
| NP_444514.1 | CPCPNMTAGDGPLVIMGEVRDGVAVLDAGSYVR | |
| | AASEKRVKKILELLEKQACELLNRFQDLEVLFQGP | |
| | HHHHHHGLNDIFEAQKIEWHE | |

### Example 18

### Perlecan Construct

[0695] Perlecan constructs were designed using fragments from published sequences. Constructs were designed with various combinations of signal sequences, 3C protease cleavage sites, histidine tags and biotinylation sequences. The designed constructs include those listed in Table 24.

TABLE 24
Perlecan construct

| | | SEQ |
|---|---|---|
| | | ID |
| Protein | Sequence | NO |
| Perlecan | MDMRVPAQLLGLLLLWFSGVLGAFAHLQVPERVVPYFTQTPYS | 369 |
| construct | FLPLPTIKDAYRKFEIKITFRPDSADGMLLYNGQKRVPGSPTNLA | |
| with | NRQPDFISFGLVGGRPEFRFDAGSGMATIRHPTPLALGHFHTVTL | |
| residues | LRSLTQGSLIVGDLAPVNGTSQGKFQGLDLNEELYLGGYPDYGA | |
| 3653-4392 | IPKAGLSSGFIGCVRELRIQGEEIVFHDLNLTAHGISHCPTCRDRP | |
| of | CQNGGQCHDSESSSYVCVCPAGFTGSRCEHSQALHCHPEACGP | |
| NP_001278789.1 | DATCVNRPDGRGYTCRCHLGRSGLRCEEGVTVTTPSLSGAGSYL | |
| | ALPALTNTHHELRLDVEFKPLAPDGVLLFSGGKSGPVEDFVSLA | |
| | MVGGHLEFRYELGSGLAVLRSAEPLALGRWHRVSAERLNKDGS | |
| | LRVNGGRPVLRSSPGKSQGLNLHTLLYLGGVEPSVPLSPATNMS | |
| | AHFRGCVGEVSVNGKRLDLTYSFLGSQGIGQCYDSSPCERQPCQ | |
| | HGATCMPAGEYEFQCLCRDGFKGDLCEHEENPCQLREPCLHGG | |
| | TCQGTRCLCLPGFSGPRCQQGSGHGIAESDWHLEGSGGNDAPG | |
| | QYGAYFHDDGFLAFPGHVFSRSLPEVPETIELEVRTSTASGLLLW | |
| | QGVEVGEAGQGKDFISLGLQDGHLVFRYQLGSGEARLVSEDPIN | |
| | DGEWHRVTALREGRRGSIQVDGEELVSGRSPGPNVAVNAKGSV | |
| | YIGGAPDVATLTGGRFSSGITGCVKNLVLHSARPGAPPPQPLDLQ | |
| | HRAQAGANTRPCPSLEVLFQGPHHHHHHGLNDIFEAQKIEWHE | |

### Example 19

### LTBP1 Constructs

[0696] LTBP1 constructs were designed using fragments from published sequences. Constructs were designed with N-terminal secretion signals and C-terminal His tags for purification. The designed constructs include those listed in the Table below.

TABLE 25
LTBP constructs

| | | SEQ ID |
|---|---|---|
| Protein | Sequence | NO |
| L1-ETB3E, type 1 | MDMRVPAQLLGLLLLWFSGVLGGQGCVDVNECE | 370 |
| | LLSGVCGEAFCENVEGSFLCVCADENQEYSPMTG | |
| | QCRSRTSTDLDVDVDQPKEEKKECYYNLNDASLC | |
| | DNVLAPNVTKQECCCTSGVGWGDNCEIFPCPVLG | |
| | TAEFTEMCPKGKGFVPAGESSSEAGGENYKDADE | |
| | CLLFGQEICKNGFCLNTRPGYECYCKQGTYYDPV | |
| | KLQCFHHHHHH | |
| L1-ETB3-C-term, | MDMRVPAQLLGLLLLWFSGVLGGQGCVDVNECE | 371 |
| type 1 | LLSGVCGEAFCENVEGSFLCVCADENQEYSPMTG | |
| | QCRSRTSTDLDVDVDQPKEEKKECYYNLNDASLC | |
| | DNVLAPNVTKQECCCTSGVGWGDNCEIFPCPVLG | |
| | TAEFTEMCPKGKGFVPAGESSSEAGGENYKDADE | |
| | CLLFGQEICKNGFCLNTRPGYECYCKQGTYYDPV | |
| | KLQCFDMDECQDPSSCIDGQCVNTEGSYNCFCTH | |
| | PMVLDASEKRCIRPAESNEQIEETDVYQDLCWEH | |
| | LSDEYVCSRPLVGKQTTYTECCCLYGEAWGMQC | |
| | ALCPLKDSDDYAQLCNIPVTGRRQPYGRDALVDF | |
| | SEQYTPEADPYFIQDRFLNSFEELQAEECGILNGCE | |
| | NGRCVRVQEGYTCDCFDGYHLDTAKMTCVDVN | |
| | ECDELNNRMSLCKNAKCINTDGSYKCLCLPGYVP | |
| | SDKPNYCTPLNTALNLEKDSDLEHHHHHH | |
| L1-ETB3E, type 2 | MDMRVPAQLLGLLLLWFSGVLGNECELLSGVCG | 372 |
| | EAFCENVEGSFLCVCADENQEYSPMTGQCRSRTS | |
| | TDLDVDVDQPKEEKKECYYNLNDASLCDNVLAP | |
| | NVTKQECCCTSGVGWGDNCEIFPCPVLGTAEFTE | |
| | MCPKGKGFVPAGESSSEAGGENYKDADECLLFG | |
| | QEICKNGFCLNTRPGYECYCKQGTYYDPVKLQCF | |
| | HHHHHH | |
| L1-ETB3-C-term, | MDMRVPAQLLGLLLLWFSGVLGNECELLSGVCG | 373 |
| type 2 | EAFCENVEGSFLCVCADENQEYSPMTGQCRSRTS | |
| | TDLDVDVDQPKEEKKECYYNLNDASLCDNVLAP | |
| | NVTKQECCCTSGVGWGDNCEIFPCPVLGTAEFTE | |
| | MCPKGKGFVPAGESSSEAGGENYKDADECLLFG | |
| | QEICKNGFCLNTRPGYECYCKQGTYYDPVKLQCF | |
| | DMDECQDPSSCIDGQCVNTEGSYNCFCTHPMVLD | |
| | ASEKRCIRPAESNEQIEETDVYQDLCWEHLSDEYV | |
| | CSRPLVGKQTTYTECCCLYGEAWGMQCALCPLK | |
| | DSDDYAQLCNIPVTGRRQPYGRDALVDFSEQYTP | |
| | EADPYFIQDRFLNSFEELQAEECGILNGCENGRCV | |
| | RVQEGYTCDCFDGYHLDTAKMTCVDVNECDELN | |
| | NRMSLCKNAKCINTDGSYKCLCLPGYVPSDKPNY | |
| | CTPLNTALNLEKDSDLEHHHHHH | |
| L1-ETB3E, type 3 | MDMRVPAQLLGLLLLWFSGVLGDVNECELLSGV | 374 |
| | CGEAFCENVEGSFLCVCADENQEYSPMTGQCRSR | |
| | TSTDLDVDVDQPKEEKKECYYNLNDASLCDNVL | |
| | APNVTKQECCCTSGVGWGDNCEIFPCPVLGTAEF | |
| | TEMCPKGKGFVPAGESSSEAGGENYKDADECLLF | |
| | GQEICKNGFCLNTRPGYECYCKQGTYYDPVKLQC | |
| | FHHHHHH | |
| L1-EETB3EE | MDMRVPAQLLGLLLLWFSGVLGDIDECVNNTVC | 375 |
| | DSHGFCDNTAGSFRCLCYQGFQAPQDGQGCVDV | |
| | NECELLSGVCGEAFCENVEGSFLCVCADENQEYS | |
| | PMTGQCRSRTSTDLDVDVDQPKEEKKECYYNLN | |
| | DASLCDNVLAPNVTKQECCCTSGVGWGDNCEIFP | |
| | CPVLGTAEFTEMCPKGKGFVPAGESSSEAGGENY | |
| | KDADECLLFGQEICKNGFCLNTRPGYECYCKQGT | |
| | YYDPVKLQCFDMDECQDPSSCIDGQCVNTEGSYN | |
| | CFCTHPMVLDASEKRCIHHHHHH | |
| L1-E11-TB3 | MDMRVPAQLLGLLLLWFSGVLGEINECTVNPDIC | 376 |
| | GAGHCINLPVRYTCICYEGYRFSEQQRKCVDIDEC | |
| | TQVQHLCSQGRCENTEGSFLCICPAGFMASEEGT | |
| | NCIDVDECLRPDVCGEGHCVNTVGAFRCEYCDSG | |
| | YRMTQRGRCEDIDECLNPSTCPDEQCVNSPGSYQ | |
| | CVPCTEGFRGWNGQCLDVDECLEPNVCANGDCS | |
| | NLEGSYMCSCHKGYTRTPDHKHCRDIDECQQGN | |
| | LCVNGQCKNTEGSFRCTCGQGYQLSAAKDQCEDI | |
| | DECQHRHLCAHGQCRNTEGSFQCVCDQGYRASG | |
| | LGDHCEDINECLEDKSVCQRGDCINTAGSYDCTC | |
| | PDGFQLDDNKTCQDINECEHPGLCGPQGECLNTE | |
| | GSFHCVCQQGFSISADGRTCEDIDECVNNTVCDSH | |
| | GFCDNTAGSFRCLCYQGFQAPQDGQGCVDVNEC | |
| | ELLSGVCGEAFCENVEGSFLCVCADENQEYSPMT | |
| | GQCRSRTSTDLDVDVDQPKEEKKECYYNLNDAS | |
| | LCDNVLAPNVTKQECCCTSGVGWGDNCEIFPCPV | |
| | LGTAEFTEMCPKGKGFVPAGESSSEAGGENYKDA | |
| | HHHHHH | |
| L1-E11-TB3EE | MDMRVPAQLLGLLLLWFSGVLGEINECTVNPDIC | 377 |
| | GAGHCINLPVRYTCICYEGYRFSEQQRKCVDIDEC | |
| | TQVQHLCSQGRCENTEGSFLCICPAGFMASEEGT | |
| | NCIDVDECLRPDVCGEGHCVNTVGAFRCEYCDSG | |
| | YRMTQRGRCEDIDECLNPSTCPDEQCVNSPGSYQ | |
| | CVPCTEGFRGWNGQCLDVDECLEPNVCANGDCS | |
| | NLEGSYMCSCHKGYTRTPDHKHCRDIDECQQGN | |
| | LCVNGQCKNTEGSFRCTCGQGYQLSAAKDQCEDI | |
| | DECQHRHLCAHGQCRNTEGSFQCVCDQGYRASG | |
| | LGDHCEDINECLEDKSVCQRGDCINTAGSYDCTC | |
| | PDGFQLDDNKTCQDINECEHPGLCGPQGECLNTE | |
| | GSFHCVCQQGFSISADGRTCEDIDECVNNTVCDSH | |
| | GFCDNTAGSFRCLCYQGFQAPQDGQGCVDVNEC | |
| | ELLSGVCGEAFCENVEGSFLCVCADENQEYSPMT | |
| | GQCRSRTSTDLDVDVDQPKEEKKECYYNLNDAS | |
| | LCDNVLAPNVTKQECCCTSGVGWGDNCEIFPCPV | |
| | LGTAEFTEMCPKGKGFVPAGESSSEAGGENYKDA | |
| | DECLLFGQEICKNGFCLNTRPGYECYCKQGTYYD | |
| | PVKLQCFDMDECQDPSSCIDGQCVNTEGSYNCFC | |
| | THPMVLDASEKRCIHHHHHH | |
| L1-ΔN441 | MDMRVPAQLLGLLLLWFSGVLGSTHPPPLPAKEE | 378 |
| | PVEALTFSREHGPGVAEPEVATAPPEKEIPSLDQE | |
| | KTKLEPGQPQLSPGISTIHLHPQFPVVIEKTSPPVPV | |
| | EVAPEASTSSASQVIAPTQVTEINECTVNPDICGAG | |
| | HCINLPVRYTCICYEGYRFSEQQRKCVDIDECTQV | |
| | QHLCSQGRCENTEGSFLCICPAGFMASEEGTNCID | |
| | VDECLRPDVCGEGHCVNTVGAFRCEYCDSGYRM | |
| | TQRGRCEDIDECLNPSTCPDEQCVNSPGSYQCVPC | |
| | TEGFRGWNGQCLDVDECLEPNVCANGDCSNLEG | |
| | SYMCSCHKGYTRTPDHKHCRDIDECQQGNLCVN | |
| | GQCKNTEGSFRCTCGQGYQLSAAKDQCEDIDECQ | |
| | HRHLCAHGQCRNTEGSFQCVCDQGYRASGLGDH | |
| | CEDINECLEDKSVCQRGDCINTAGSYDCTCPDGF | |
| | QLDDNKTCQDINECEHPGLCGPQGECLNTEGSFH | |
| | CVCQQGFSISADGRTCEDIDECVNNTVCDSHGFC | |
| | DNTAGSFRCLCYQGFQAPQDGQGCVDVNECELL | |
| | SGVCGEAFCENVEGSFLCVCADENQEYSPMTGQC | |
| | RSRTSTDLDVDVDQPKEEKKECYYNLNDASLCD | |
| | NVLAPNVTKQECCCTSGVGWGDNCEIFPCPVLGT | |
| | AEFTEMCPKGKGFVPAGESSSEAGGENYKDADEC | |
| | LLFGQEICKNGFCLNTRPGYECYCKQGTYYDPVK | |
| | LQCFDMDECQDPSSCIDGQCVNTEGSYNCFCTHP | |
| | MVLDASEKRCIRPAESNEQIEETDVYQDLCWEHL | |
| | SDEYVCSRPLVGKQTTYTECCCLYGEAWGMQCA | |
| | LCPLKDSDDYAQLCNIPVTGRRQPYGRDALVDFS | |
| | EQYTPEADPYFIQDRFLNSFEELQAEECGILNGCE | |
| | NGRCVRVQEGYTCDCFDGYHLDTAKMTCVDVN | |
| | ECDELNNRMSLCKNAKCINTDGSYKCLCLPGYVP | |
| | SDKPNYCTPLNTALNLEKDSDLEHHHHHH | |

[0697] To test expression of the constructs, 293-6E cells were transiently co-transfected with plasmids expressing the LTBP1 constructs and proTGF-131 and grown in 4 ml cultures in F17 serum-free medium. After 5 days in culture, protein complexes were pulled down using Ni-NTA beads. Recovered beads were washed and bound proteins were eluted. Expression controls were proTGF-β1 C4S, full length LTBP1 complexed with proTGF-β1, and proteins were run under both reducing and non-reducing conditions using SDS PAGE. Resulting gels were stained with Coomassie Blue and analyzed (see FIGS. 14A and 14B). Complex-capable protein was produced with all constructs with the exception of E11TB3. Of the constructs tested, the gel indicated that E11TB3EE had good expression and was capable of complex formation without aggregation.

### Example 20

### ELISA Analysis

[0698] Enzyme-linked immunosorbent assay (ELISA) analysis is carried out to assess antibody binding. 96-well ELISA assay plates are coated with neutravidin, a deglycosylated version of streptavidin with a more neutral pI. Target proteins are expressed with or without histidine (His) tags and subjected to biotinylation. Biotinylated target proteins are incubated with neutravidin-coated ELISA assay plates for two hours at room temperature and unbound proteins are removed by washing three times with wash buffer (25 mM Tris, 150 mM NaCl, 0.05% TWEEN®-20). Primary antibodies being tested are added to each well and allowed to incubate at room temperature for 1 hour or more. Unbound antibody is then removed by washing three times with wash buffer. Secondary antibodies capable of binding to primary antibodies being tested and conjugated with detectable labels are then incubated in each well for 30 minutes at room temperature. Unbound secondary antibodies are removed by washing three times with wash buffer. Finally, bound secondary antibodies are detected by enzymatic reaction, fluorescence detection and/or luminescence detection, depending on the detectable label present on secondary antibodies being detected.

### Example 21

### Isolation of T Cell Populations

[0699] Different T cell populations are isolated from C57B1/6 mouse primary splenocytes to carry out T cell assays described herein. CD4+ cells are purified from splenocytes using a MACS CD4+ T cell isolation kit II (Miltenyi Biotec Inc., San Diego, Calif.). Isolated CD4+ cells are then used to segregate CD4+CD25− and CD4+CD25+ cell populations using a MACS anti-CD25 microbead kit (Miltenyi Biotec Inc.). Typically, greater than 80% of CD4+CD25+ cells isolated are also FoxP3+. CD3ε-depleted splenocyte preparations are obtained by using a MACS anti-CD3ε microbead kit (Miltenyi Biotech Inc.).

### Example 22

### Treg Induction Assay

[0700] CD4+CD25− become induced regulatory T cells (iTreg) in response to T cell activation in the presence of TGF-β1 growth factor. iTreg cells express the transcription factor FoxP3 and are capable of reducing cell division in CD25− T cells. To test samples for the presence and/or level of free TGF-β1 growth factor, a T cell induction assay is used. CD4+CD25− cells are cultured in wells coated with anti-CD3ε (145-2C11, BD Biosciences, San Jose, Calif.; or purified in house from hybridoma supernatants) and anti-CD28 antibodies (37.51, BD Biosciences) to induce T cell receptor (TCR) crosslinking. IL-2 (10 ng/ml) is added to the cells to promote activation. Samples with or without TGF-β1 (e.g. experimental samples where antibody candidates have been used to contact a solution or cell population comprising TGF-β1 prodomain complexes +/−LTBP1S or GARP) are added to cultures and cells are allowed to incubate for 3 days before analysis. Cells are stained with anti-CD4 (RM4-5, BD Biosciences), anti-CD25 antibody (PC61, BD Biosciences), and permeabilized for staining with an anti-FoxP3 antibody (FJK-165, eBioscience, San Diego, Calif.). CD4+ cells are analyzed for CD25 and FoxP3 expression by fluorescence-associated cell sorting (FACS) using a BD Accuri C6 cytometer (BD Biosciences, San Jose, Calif.).

### Example 23

### T Cell Suppression Assay

[0701] To look for iTreg-dependent suppression of CD4+CD25− T cell proliferation, cells generated in Treg induction assays (or derived from other sources including isolation of CD4+CD25+ cells from primary splenocytes as described above) are used in suppressor assays. Naïve CD4+CD25− T cells are isolated and labeled with carboxyfluorescein succinimidyl ester (CFSE) dye. iTregs and CD4+CD25− responder cells are cultured at different ratios, together with CD3ε-depleted splenocytes and 1 μg/ml soluble anti-CD3ε for 3 days prior to analysis. The percentage of dividing CD4+CD25− responder cells is calculated by examining the intensity of CFSE dye, which is diluted with successive rounds of cell division.

### Example 24

### Antibody-Based Treg Induction

[0702] CD4+CD25− cells were cultured in wells coated with anti-CD3ε (145-2C11, BD Biosciences or purified in house from hybridoma supernatants) and anti-CD28 antibodies (37.51, BD Biosciences) to induce T cell receptor (TCR) crosslinking. Cultures were also treated with or without IL-2 (10 ng/ml) to promote activation. Samples comprising proTGF-β1 complexed with sGARP were added to cells at a concentration of 400 pM in the presence or absence of 67 nM polyclonal anti-TGF-β1 LAP antibody (AF-246-NA, R&D Systems, Minneapolis, Minn.), 67 nM monoclonal anti-LAP antibody cocktail [containing a mixture of anti-LAP antibodies MAB246 and MAB2463 (R&D Systems, Minneapolis, Minn.)] or 100 nM 195_1_F02 scFv-Fc. Cells were then allowed to incubate for 3 days before analysis. Cells were stained with anti-CD4 (RM4-5, BD Biosciences), anti-CD25 antibody (PC61, BD Biosciences), and permeabilized for staining with an anti-FoxP3 antibody (FJK-165, eBioscience, San Diego, Calif.). Cells were then analyzed for FoxP3 expression by fluorescence-associated cell sorting (FACS) using a BD Accuri C6 cytometer (BD Biosciences, San Jose, Calif.). Results demonstrated iTreg induction (by detection of FoxP3 expression) when any of the three antibodies (AF-246-NA, anti-LAP antibody cocktail or 195_1_F02 scFv-Fc) was used for iTreg induction (see Table below).

TABLE 26
Expression of iTreg marker FoxP3

| Antibody | % FoxP3 + Cells |
|---|---|
| No antibody | 0.7% |
| anti-LAP antibody cocktail | 27.4% |
| 195_1_F02 scFv | 18.3% |
| AF-246-NA | 43.7% |

### Example 25

### Antibody-Based T Cell Suppression

[0703] Samples comprising proTGF-β1 complexed with sGARP are prepared with or without 67 nM polyclonal anti-TGF-β1 LAP antibody (AF-246-NA, R&D Systems, Minneapolis, Minn.), 67 nM monoclonal anti-LAP antibody cocktail [containing a mixture of anti-LAP antibodies MAB246 and MAB2463 (R&D Systems, Minneapolis, Minn.)] or 100 nM 195_1_F02 scFv-Fc. Samples are combined with CD4+CD25− cells and resulting cells are combined with CD4+CD25− cells labeled with CFSE dye and cultured with 5×10⁵ CD3ε depleted splenocyte preparations with 1 μg/ml soluble anti-CD3e for 3 days prior to analysis. The percentage of dividing cells are calculated by examining the intensity of CFSE dye, which becomes diluted with successive rounds of cell division.

### Example 26

### Comparison of Anti-LAP Antibodies

[0704] Commercially available anti-TGF-β1 LAP antibodies were analyzed for their ability to bind GARP-proTGF-β1 or GARP-TGF-β1 LAP. 300.19 cells stably expressing human GARP-proTGF-01, GARP-TGF-β1 LAP, or 300.19 control cells were incubated with increasing concentrations of MAB246 or MAB2463 antibody (R&D Systems, Minneapolis, Minn.), washed, and stained with fluorescently labeled anti-mouse IgG antibody. Cell fluorescence was measured by flow cytometry. Binding specific for LAP was calculated for each antibody concentration by subtracting mean fluorescence intensity (MFI) of control 300.19 cells from MFI of protein expressing cells. Best-fit values were determined by nonlinear regression analysis of specific binding data and fitting to a one-site binding model with Prism software. For GARP-proTGF-β1 cells, MAB2463 exhibited a K_{D} value of 0.19±0.01 μg/ml, while MAB246 yielded a K_{D} value of 35.10±6.73 μg/ml. With GARP-TGF-β1 LAP expressing cells, MAB2463 exhibited a K_{D} value of 0.11±0.02 μg/ml, while MAB246 yielded a K_{D} value of 0.08±0.01 μg/ml. These results indicate that while both antibodies bind to GARP-TGF-β1 LAP with high affinity, MAB246 is more specific for this complex than MAB2463, which also binds the GARP-associated GPC with high affinity.

[0705] Further analysis was carried out by luciferase assay. SW480 or SW480-β6 cells were transiently transfected with human LTBP1 or GARP plus proTGF-β1. After 24 hours, transfectants were collected and co-cultured for 18 hours with TMLC reporter cells (expressing luciferase in response to TGF-β signaling activity) in the absence or presence of 20 μg/ml or 50 μg/ml concentrations of MAB246 and relative light units (RLUs) were calculated based on luciferase activity in lysates harvested from the reporter cells.

[0706] Surprisingly, SW480 cells expressing LTBP1-proTGF-β1 yielded a two fold increase in reporter activity in the presence of 20 μg/ml of MAB246 and greater than a 2.5 fold increase in the presence of 50 μg/ml of MAB246. In comparison, GARP-proTGF-β1-expressing SW480 cells yielded less than a two-fold increase in reporter activity in the presence of either concentration of MAB246. These results indicate that MAB246 is able to activate TGF-β1 activity when provided to systems with proTGF-β1 and further, that MAB246 more favorably activates TGF-β1 activity in the presence of LTBP-associated proTGF-β1 in comparison to GARP-associated proTGF-β1.

[0707] When provided in combination with αvβ6 integrin, MAB246 was also shown to enhance the ability to αvβ6 integrin to induce TGF-β1 activity. SW480 cells expressing proTGF-β1 and LTBP were cultured with or without SW480-β6 cells (expressing αvβ₆) before being co-cultured for 18 hours with TMLC reporter cells (expressing luciferase in response to TGF-β signaling activity) in the absence or presence of 20 μg/ml or 50 μg/ml concentrations of MAB246. Relative light units (RLUs) were obtained from resulting lysates by measuring luciferase activity. In the absence of antibody, transfected cells co-cultured with αvβ₆-expressing cells yielded a 2.5 fold increase in RLUs as compared to transfected cells alone. Surprisingly, this was enhanced to a nearly 3.5 fold increase when either 20 μg/ml or 50 μg/ml concentrations of MAB246 was included. This result indicates that the effects of MAB246 and αvβ₆ are additive.

### Example 27

### Anti-LAP Antibody Analysis

[0708] Antibodies were tested for their ability to bind to LAP by ELISA. Anti-LAP antibodies MAB246 and MAB2463 (R&D Systems, Minneapolis, Minn.) were compared with 1D11 antibody (mouse monoclonal anti-TGF-β1, 2 and 3 antibody, R&D Systems, Minneapolis, Minn.), AF-101-NA (polyclonal chicken anti-TGF-β1 antibody, R&D Systems, Minneapolis, Minn.), AF-246-NA (goat polyclonal anti-TGF-β LAP antibody, R&D Systems, Minneapolis, Minn.) and 9016.2 (mouse monoclonal anti-TGF-β LAP antibody, Abcam, Cambridge, UK). An anti-Histidine antibody was also included in the analysis as a control. 1:1,000, 1:5,000 and 1:10,000 dilutions of each antibody were tested.

[0709] ELISA analysis was carried out as described in Example 20, except where modified as described hereinbelow. ELISA plates were coated with neutravidin and incubated with biotinylated His-tagged TGF-β1 LAP C4S. Plates were incubated with the antibody preparations described above and antibody binding to bound TGF-β1 LAP C4S was detected using a fluorescence-based secondary antibody detection system. The results are presented in Table 27 in relative fluorescence units (RFUs) along with standard deviation (St Dev) values. MAB2463 demonstrated the highest affinity for LAP in the ELISA, followed by MAB246. 9016.2 also bound to LAP, but at nearly half the affinity of MAB246. Target protein-free control wells treated with assay antibodies demonstrated less than 400 RFUs.

TABLE 27
ELISA data

| Antibody | Dilution | RFU | St Dev |
|---|---|---|---|
| MAB2463 | 1:1,000 | 57,465 | 17,811 |
| MAB2463 | 1:5,000 | 42,086 | 8,309 |
| MAB2463 | 1:10,000 | 32,043 | 6,573 |
| anti-His | 1:1,000 | 40,616 | 9,191 |
| anti-His | 1:5,000 | 22,304 | 1,406 |
| anti-His | 1:10,000 | 26,740 | 2,947 |
| MAB246 | 1:1,000 | 26,786 | 2,565 |
| MAB246 | 1:5,000 | 24,883 | 7,180 |
| MAB246 | 1:10,000 | 18,825 | 3,524 |
| 1D11 | 1:1,000 | 218 | 10 |
| 1D11 | 1:5,000 | 214 | 2 |
| 1D11 | 1:10,000 | 198 | 10 |
| AF-101-NA | 1:1,000 | 194 | 8 |
| AF-101-NA | 1:5,000 | 196 | 8 |
| AF-101-NA | 1:10,000 | 756 | 1,099 |
| AF-246-NA | 1:1,000 | 198 | 18 |
| AF-246-NA | 1:5,000 | 202 | 7 |
| AF-246-NA | 1:10,000 | 197 | 7 |
| 9016.2 | 1:1,000 | 14,587 | 6,182 |
| 9016.2 | 1:5,000 | 4,536 | 1,616 |
| 9016.2 | 1:10,000 | 3,309 | 995 |
| secondary media | | 187 | 15 |

[0710] In similar assays, MAB246 was also found to bind proTGF-β1 C4S, TGF-β1 complexed with sGARP and also to more weakly bind proTGF-β1 complexed with sGARP.

[0711] Additional ELISAs were carried out to look for binding to other TGF-β isoforms or recombinant versions thereof. MAB246 did not bind to proTGF-β2 C5S, proTGFβ3 C7S or to TGF-β1 mature growth factor. Interestingly, MAB246 was found to bind chimeric proteins TGF-β2(armβ1) LAP C5S (SEQ ID NO: 303) and TGF-β1 [Trigger Loop (short) β2] LAP C4S (SEQ ID NO: 296), indicating specificity for an epitope shared between the two chimeric proteins.

### Example 28

### Activating Anti-LAP Antibody Comparison

[0712] HEK293 cells were transiently transfected with human proTGF-β1 and LTBP1 or GARP. After 24 hours, transfectants were collected and co-cultured for 18 hours with TMLC reporter cells (expressing luciferase in response to TGF-β signaling activity) in the absence or presence of cells stably expressing integrin, 20 μg/ml concentrations of MAB246, MAB2463, anti-LAP monoclonal antibody (against anti-LAP epitope 3) MAB2461 (R&D Systems) or AF-246-NA antibodies (goat polyclonal anti-TGF-β LAP antibody, R&D Systems, Minneapolis, Minn.) and relative light units (RLUs) were calculated based on luciferase activity in lysates harvested from the reporter cells (FIG. 15).

[0713] Both MAB2463 (anti-LAP epitope 1) and MAB246 (anti-LAP epitope 2) demonstrated an ability to activate TGF-β1 signaling when contacting cells expressing proTGF-β1 complexed with LTBP, but not those expressing proTGF-β1 complexed with GARP.

[0714] In further studies, MAB246 was not found to inhibit TGF-β1 signaling in the context of either complexes (GARP or LTBP with proTGF-β1)

### Example 29

### Anti-LAP Antibody Binding in Multiple Species

[0715] ELISA assays were carried out to compare binding of MAB246 and MAP2463 to proTGF-β1 and TGF-β1 LAP from other species. Target proteins (human, cyno or mouse versions of proTGF-β1 or TGF-β1 LAP) were biotinylated and incubated with neutravidin coated ELISA plates. ELISA plates were then treated with increasing concentrations of antibody and antibody binding was detected using a fluorescence-based secondary antibody detection system. Results are presented in FIGS. 16A and B. MAB2463 demonstrated binding to human and cyno proTGF-β1 and TGF-β1 LAP, while MAB246 was capable of binding to both proteins in all three species.

### Example 30

### 293T CAGA-Luciferase Assay

[0716] CAGA-luciferase assays are carried out to test antibodies that modulate GDF-8 activity. A 50 μg/ml solution of fibronectin is prepared and 100 μl are added to each well of a 96-well plate. Plates are incubated for 30 min at room temperature before free fibronectin is washed away using PBS. 293T cells comprising transient or stable expression of pGL4 (Promega, Madison, Wis.) under the control of a control promoter or promoter comprising smad1/2 responsive CAGA sequences are then used to seed fibronectin-coated wells (2×10⁴ cell/well in complete growth medium). The next day, cells are washed with 150 μl/well of cell culture medium with 0.1% bovine serum albumin (BSA) before treatment with GDF-8 with or without test antibody. Cells are incubated at 37° for 6 hours before detection of luciferase expression using BRIGHT-GLO™ reagent (Promega, Madison, Wis.) according to manufacturer's instructions.

### Example 31

### Detection of Myogenin Expression by FACS

[0717] 257384 Lonza cells (Lonza, Basel, Switzerland) are plated in 24-well plates at 4×10⁴ cells/well. The next day, cell media is replaced with differentiation media [dulbecco's modified eagle medium (DMEM)/F12 with 2% horse serum.] Varying concentrations of GDF-8 are also included in differentiation media in the presence or absence of test antibodies. Cells are then allowed to differentiate for 3 days.

[0718] After the 3 day period, differentiation status of each well is analyzed through analysis of myogenin expression levels. Cells from each treatment group are pooled and subjected to treatment using the Transcription Factor Buffer Set from BD Pharmingen (BD Biosciences, Franklin Lakes, N.J.), product number 562574 according to manufacturers instructions. After fixation and permeabilization, 5 μl of phycoerythrin (PE)-myogenin or 1.25 μl of PE-control are added to the cells and incubated at 4° C. for 50 mins. Cells are then washed and resuspended in FACS buffer before analysis of cellular fluorescence by FACS.

### Example 32

### HT2 Cell Proliferation Assay

[0719] Antibodies are tested for the ability to modulate TGF-β activity using an HT2 cell proliferation assay. HT2 cell proliferation in IL-4-containing medium is reduced in the presence of free TGF-β growth factor. Antibodies with the ability to modulate free growth factor levels by stabilizing TGF-β GPCs or by promoting the release and/or accumulation of free growth factor may be tested using the HT2 culture system described here. Cells expressing proTGF-β are co-cultured with cells expressing αᵥβ₆ integrins. Cultures are treated with various concentrations of test antibody, purified TGF-β1 (as a positive control) or anti-TGF-β antibody 1D11 (R&D Systems, Minneapolis, Minn.) as a negative control.

[0720] HT2 cells are cultured in growth media (RPMI 1640, 10% FBS, 1% P/S, 4 mM Gln, 50 μM beta-mercaptoethanol and 10 ng/mL IL-2) at 1.5×10⁵ cells/ml to ensure that cells are in log growth phase on the following day. The next day, cell supernatants being tested are diluted in HT2 assay media (RPMI 1640, 10% FBS, 1% P/S, 4 mM Gln, 50 μM beta-mercaptoethanol and 7.5 ng/mL IL-4). Growth media is removed from HT2 cell cultures and cells are washed with cytokine free media. Diluted supernatants are added to each HT2 cell culture well and HT2 cells are cultured for 48 hours at 37° C. and 5% CO₂. Cell viability in the HT2 cell cultures is then determined using CELL-TITER GLO® reagent (Promega, Madison, Wis.) according to manufacturers instructions. Results are obtained as relative light units (RLUs) which correlate with cell viability.

### Example 33

### Analysis of Recombinantly Expressed GDF-8

[0721] Histidine-tagged proGDF-8 was expressed according to the methods of Example 10. Purified proteins were analyzed by SDS-PAGE under either reducing or non-reducing conditions (to maintain protein dimers). FIG. 13 depicts the results indicating successful expression of these proteins and protein complexes.

### Example 34

### TGF-β2 Chimeras

[0722] Chimeric proteins are synthesized that comprise TGF-β2 with arm region substitutions from TGF-β1 and TGF-β3. The chimeric proteins also comprise N-terminal C5S mutations. These expressed chimeric proteins (listed in Table 28) have improved stability over some other chimeric proteins.

TABLE 28
TGF-β2 chimeric proteins.

| Protein | Protein | | |
|---|---|---|---|
| module 1 | module 2 | Chimeric Sequence | SEQ ID NO |
| TGF-β2 | TGF-β1 | SLSTSSTLDMDQFMRKRIEAIRGQILSKLKLTSPPE | 303 |
| LAP | arm | DYPEPEEVPPEVLALYNSTRDRVAGESAEPEPEPE | |
| | region | ADYYAKEVTRVLMVETHNEIYDKFKQSTHSIYMF | |
| | | FNTSELREAVPEPVLLSRAELRLLRLKLKVEQHVE | |
| | | LYQKYSNNSWRYLSNRLLAPSDSPEWLSFDVTGV | |
| | | VRQWLSRGGEIEGFRLSAHCSCDSRDNTLQVDIN | |
| | | GFTTGRRGDLATIHGMNRPFLLLMATPLERAQHL | |
| | | QSSRHRR | |
| TGF-β2 | TGF-β3 | SLSTSSTLDMDQFMRKRIEAIRGQILSKLKLTSPPE | 379 |
| LAP | arm | DYPEPEEVPPEVLALYNSTRELLEEMHGEREEGCT | |
| | region | QENTESEYYAKEIHKFDMIQGLAEHNELAVCPKGI | |
| | | TSKVFRFNVSSVEKNRTNLFRAEFRVLRVPNPSSK | |
| | | RNEQRIELFQILRPDEHIAKQRYIGGKNLPTRGTAE | |
| | | WLSFDVTDTVREWLLRRESNLGLEISIHCPCHTFQ | |
| | | PNGDILENIHEVMEIKFKGVDNEDDHGRGDLGRL | |
| | | KKQKDHHNPHLILMMIPPHRLDNPGQGGQRKKR | |

### Example 35

### Determining Binding Affinity

[0723] ELISA assays were carried out with increasing concentrations of MAB246 to determine dissociation constants (K_{D}) for TGF-β1 protein complexes. Results are presented in the following Table.

TABLE 29
Binding affinity, K_{D} (nM)

| | LTBP1- | sGARP- | sGARP- |
|---|---|---|---|
| Clone ID | proTGFβ1 | proTGFβ1 | TGFβ1 LAP |
| MAB246 | 0.24 ± 0.80 | 0.91 ± 0.36 | 0.14 ± 0.01 |

[0724] MAB246 had the strongest affinity for TGF-β1 LAP complexed with sGARP.

1. A method of increasing the level of free growth factor in a biological system comprising contacting said biological system with antibody MAB246 and/or MAB2463 and/or a fragment thereof.

2. The method of claim 1, wherein said biological system is selected from the group consisting of an in vitro biological system and an in vivo biological system.

3. The method of claim 2, wherein said in vivo biological system is selected from the group consisting of a niche, a tissue, a body fluid, an organ, an organ system and a subject.

4. The method of any of claims 1-3, wherein said growth factor comprises a TGF-β family member.

5. The method of claim 4, wherein said TGF-β family member is selected from the group consisting of TGF-β1, TGF-β2 and TGF-β3.

6. A method of increasing growth factor activity in a biological system, comprising contacting said biological system with antibody MAB246 and/or MAB2463 and/or a fragment thereof.

7. The method of claim 6, wherein said growth factor comprises a TGF-β family member.

8. The method of claim 7, wherein said TGF-β family member is selected from the group consisting of TGF-β1, TGF-β2 and TGF-β3.

9. The method of any of claims 6-8, wherein said biological system comprises at least one integrin.

10. The method of claim 9, wherein said at least one integrin is selected from the group consisting of αᵥβ₆ and αvβ₈ integrin.

11. A method of enhancing integrin-dependent growth factor activity in a biological system comprising contacting said biological system with antibody MAB246 and/or MAB2463 and/or a fragment thereof.

12. The method of claim 11, wherein said growth factor comprises a TGF-β family member.

13. The method of claim 12, wherein said TGF-β family member is selected from the group consisting of TGF-β1, TGF-β2 and TGF-β3.

14. The method of any of claims 11-13, wherein said biological system comprises one or more integrins selected from the group consisting of αvβ₆ and αvβ₈ integrin.

15. A method of dissociating one or more growth factors from one or more growth factor complexes (GPCs) in a biological system comprising contacting said biological system with antibody MAB246 and/or MAB2463 and/or a fragment thereof.

16. The method of claim 15, wherein said one or more GPCs comprise proTGF-β1.

17. The method of claim 16, wherein said method is selective for LTBP-associated proTGF-β1.

18. The method of any of claims 15-17, wherein said biological system is selected from the group consisting of an in vitro biological system and an in vivo biological system.

19. The method of claim 18, wherein said in vivo biological system is selected from the group consisting of a niche, a tissue, a body fluid, an organ, an organ system and a subject.

20. A method of treating a disease, disorder and/or condition in a subject comprising administering antibody MAB246 and/or MAB2463 and/or a fragment thereof.

21. A method of modulating proliferation of one or more cells in a biological system comprising contacting said biological system with antibody MAB246 and/or MAB2463 and/or a fragment thereof.

22. The method of claim 21, wherein said biological system is selected from the group consisting of an in vitro biological system and an in vivo biological system.

23. The method of claim 22, wherein said in vivo biological system is selected from the group consisting of a niche, a tissue, a body fluid, an organ, an organ system and a subject.

24. A composition comprising antibody MAB246 and/or MAB2463 and at least one excipient.

25. The composition of claim 24, wherein said excipient comprises a pharmaceutically acceptable excipient.

26. A kit comprising the composition of either of claim 24 or 25 and instructions for use thereof.

27. A method of modulating growth factor activity in a biological system comprising contacting said biological system with a targeting complex, said targeting complex comprising a recombinant protein selected from the group consisting of any of those listed in Tables 1, 6, 7, 13, 15, 16 and 17, wherein said recombinant protein is complexed with a targeting agent, said targeting agent comprising one or more amino acid sequences selected from the group consisting of any of those listed in Tables 9, 10, 11 or 12 or wherein said targeting agent comprises a protein selected from the group consisting of LTBP1, LTBP1S, LTBP2, LTBP3, LTBP4, fibrillin-1, fibrillin-2, fibrillin-3, fibrillin-4, GARP, GASP, LRRC33, perlecan, decorin, elastin and collagen.

28. The method of claim 27, wherein said modulating growth factor activity comprises reducing growth factor activity in one or more target sites.

29. The method of claim 28, wherein said growth factor comprises a TGF-β family member.

30. The method of claim 29, wherein said recombinant protein comprises a LAP, said LAP complexed with a protein selected from the group consisting of LTBP1, LTBP1S, LTBP2, LTBP3 and LTBP4.

31. A method of treating a TGF-β-related indication in a subject comprising contacting said subject with a targeting complex, said targeting complex comprising a recombinant protein selected from the group consisting of any of those listed in Tables 1, 6, 7, 13, 15, 16 and 17, said recombinant protein complexed with a targeting agent, said targeting agent comprising one or more amino acid sequences selected from the group consisting of any of those listed in Tables 9, 10, 11 or 12 or wherein said targeting agent comprises a protein selected from the group consisting of LTBP1, LTBP1S, LTBP2, LTBP3, LTBP4, fibrillin-1, fibrillin-2, fibrillin-3, fibrillin-4, GARP, GASP, LRRC33, perlecan, decorin, elastin and collagen.

32. The method of claim 31, wherein said TGF-β related indication comprises a fibrotic indication selected from the group consisting of lung fibrosis, kidney fibrosis, liver fibrosis, cardiovascular fibrosis, skin fibrosis, and bone marrow fibrosis.

33. The method of claim 31, wherein said TGF-β-related indication comprises myelofibrosis.

34. The method of claim 31, wherein said TGF-β-related indication comprises one or more types of cancer or cancer-related conditions.

35. The method of claim 34, wherein said one or more types of cancer or cancer-related conditions are selected from the group consisting of colon cancer, renal cancer, breast cancer, malignant melanoma and glioblastoma.

36. The method of claim 31, wherein said TGF-β-related indication comprises one or more muscle disorders and/or injuries.

37. The method of claim 36, wherein said one or more muscle disorders and/or injuries are selected from the group consisting of cachexia, muscular dystrophy, chronic obstructive pulmonary disease (COPD), motor neuron disease, trauma, neurodegenerative disease, infection, rheumatoid arthritis, immobilization, disuse atrophy, sarcopenia, inclusion body myositis and diabetes.

38. The method of claim 31, wherein said TGF-β-related indication comprises one or more immune and/or autoimmune disorder.

39. A method of treating a TGF-β-related indication in a subject comprising contacting said subject with antibody MAB246 and/or MAB2463 and/or a fragment thereof.

40. The method of claim 39, wherein said TGF-β-related indication comprises tooth loss and/or degeneration.

The application's sequence listing, which the Patent Office published only in electronic form, follows.

SEQUENCE LISTING (387 sequences)

SEQ ID NO: 1 - protein, 361 aa, Homo sapiens
LSTCKTIDMELVKRKRIEAIRGQILSKLRLASPPSQGEVPPGPLPEAVLALYNSTRDRVAGESAEPEPEPEADYYAKEVTRVLMVETHNEIYDKFKQSTHSIYMFFNTSELREAVPEPVLLSRAELRLLRLKLKVEQHVELYQKYSNNSWRYLSNRLLAPSDSPEWLSFDVTGVVRQWLSRGGEIEGFRLSAHCSCDSRDNTLQVDINGFTTGRRGDLATIHGMNRPFLLLMATPLERAQHLQSSRHRRALDTNYCFSSTEKNCCVRQLYIDFRKDLGWKWIHEPKGYHANFCLGPCPYIWSLDTQYSKVLALYNQHNPGASAAPCCVPQALEPLPIVYYVGRKPKVEQLSNMIVRSCKCS

SEQ ID NO: 2 - protein, 395 aa, Homo sapiens
SLSTCSTLDMDQFMRKRIEAIRGQILSKLKLTSPPEDYPEPEEVPPEVISIYNSTRDLLQEKASRRAAACERERSDEEYYAKEVYKIDMPPFFPSENAIPPTFYRPYFRIVRFDVSAMEKNASNLVKAEFRVFRLQNPKARVPEQRIELYQILKSKDLTSPTQRYIDSKVVKTRAEGEWLSFDVTDAVHEWLHHKDRNLGFKISLHCPCCTFVPSNNYIIPNKSEELEARFAGIDGTSTYTSGDQKTIKSTRKKNSGKTPHLLLMLLPSYRLESQQTNRRKKRALDAAYCFRNVQDNCCLRPLYIDFKRDLGWKWIHEPKGYNANFCAGACPYLWSSDTQHSRVLSLYNTINPEASASPCCVSQDLEPLTILYYIGKTPKIEQLSNMIVKSCKCS

SEQ ID NO: 3 - protein, 392 aa, Homo sapiens
SLSLSTCTTLDFGHIKKKRVEAIRGQILSKLRLTSPPEPTVMTHVPYQVLALYNSTRELLEEMHGEREEGCTQENTESEYYAKEIHKFDMIQGLAEHNELAVCPKGITSKVFRFNVSSVEKNRTNLFRAEFRVLRVPNPSSKRNEQRIELFQILRPDEHIAKQRYIGGKNLPTRGTAEWLSFDVTDTVREWLLRRESNLGLEISIHCPCHTFQPNGDILENIHEVMEIKFKGVDNEDDHGRGDLGRLKKQKDHHNPHLILMMIPPHRLDNPGQGGQRKKRALDTNYCFRNLEENCCVRPLYIDFRQDLGWKWVHEPKGYYANFCSGPCPYLRSADTTHSTVLGLYNTLNPEASASPCCVPQDLEPLTILYYVGRTPKVEQLSNMVVKSCKCS

SEQ ID NO: 4 - protein, 383 aa, Homo sapiens
AEGPAAAAAAAAAAAAAGVGGERSSRPAPSVAPEPDGCPVCVWRQHSRELRLESIKSQILSKLRLKEAPNISREVVKQLLPKAPPLQQILDLHDFQGDALQPEDFLEEDEYHATTETVISMAQETDPAVQTDGSPLCCHFHFSPKVMFTKVLKAQLWVYLRPVPRPATVYLQILRLKPLTGEGTAGGGGGGRRHIRIRSLKIELHSRSGHWQSIDFKQVLHSWFRQPQSNWGIEINAFDPSGTDLAVTSLGPGAEGLHPFMELRVLENTKRSRRNLGLDCDEHSSESRCCRYPLTVDFEAFGWDWIIAPKRYKANYCSGQCEYMFMQKYPHTHLVQQANPRGSAGPCCTPTKMSPINMLYFNDKQQIIYGKIPGMVVDRCGCS

SEQ ID NO: 5 - protein, 352 aa, Homo sapiens [sequence omitted]

SEQ ID NO: 6 - protein, 406 aa, Homo sapiens
SPTPGSEGHSAAPDCPSCALAALPKDVPNSQPEMVEAVKKHILNMLHLKKRPDVTQPVPKAALLNAIRKLHVGKVGENGYVEIEDDIGRRAEMNELMEQTSEIITFAESGTARKTLHFEISKEGSDLSVVERAEVWLFLKVPKANRTRTKVTIRLFQQQKHPQGSLDTGEEAEEVGLKGERSELLLSEKVVDARKSTWHVFPVSSSIQRLLDQGKSSLDVRIACEQCQESGASLVLLGKKKKKEEEGEGKKKGGGEGGAGADEEKEQSHRPFLMLQARQSEDHPHRRRRRGLECDGKVNICCKKQFFVSFKDIGWNDWIIAPSGYHANYCEGECPSHIAGTSGSSLSFHSTVINHYRMRGHSPFANLKSCCVPTKLRPMSMLYYDDGQNIIKKDIQNMIVEECGCS

SEQ ID NO: 7 - protein, 379 aa, Homo sapiens
SPTPPPTPAAPPPPPPPGSPGGSQDTCTSCGGFRRPEELGRVDGDFLEAVKRHILSRLQMRGRPNITHAVPKAAMVTALRKLHAGKVREDGRVEIPHLDGHASPGADGQERVSEIISFAETDGLASSRVRLYFFISNEGNQNLFVVQASLWLYLKLLPYVLEKGSRRKVRVKVYFQEQGHGDRWNMVEKRVDLKRSGWHTFPLTEAIQALFERGERRLNLDVQCDSCQELAVVPVFVDPGEESHRPFVVVQARLGDSRHRIRKRGLECDGRTNLCCRQQFFIDFRLIGWNDWIIAPTGYYGNYCEGSCPAYLAGVPGSASSFHTAVVNQYRMRGLNPGTVNSCCIPTKLSTMSMLYFDDEYNIVKRDVPNMIVEECGCA

SEQ ID NO: 8 - protein, 334 aa, Homo sapiens
TPRAGGQCPACGGPTLELESQRELLLDLAKRSILDKLHLTQRPTLNRPVSRAALRTALQHLHGVPQGALLEDNREQECEIISFAETGLSTINQTRLDFHFSSDRTAGDREVQQASLMFFVQLPSNTTWTLKVRVLVLGPHNTNLTLATQYLLEVDASGWHQLPLGPEAQAACSQGHLTLELVLEGQVAQSSVILGGAAHRPFVAARVRVGGKHQIHRRGIDCQGGSRMCCRQEFFVDFREIGWHDWIIQPEGYAMNFCIGQCPLHIAGMPGIAASFHTAVLNLLKANTAAGTTGGGSCCVPTARRPLSLLYYDRDSNIVKTDIPDMVVEACGCS

SEQ ID NO: 9 - protein, 331 aa, Homo sapiens
QGTGSVCPSCGGSKLAPQAERALVLELAKQQILDGLHLTSRPRITHPPPQAALTRALRRLQPGSVAPGNGEEVISFATVTDSTSAYSSLLTFHLSTPRSHHLYHARLWLHVLPTLPGTLCLRIFRWGPRRRRQGSRTLLAEHHITNLGWHTLTLPSSGLRGEKSGVLKLQLDCRPLEGNSTVTGQPRRLLDTAGHQQPFLELKIRANEPGAGRARRRTPTCEPATPLCCRRDHYVDFQELGWRDWILQPEGYQLNYCSGQCPPHLAGSPGIAASFHSAVFSLLKANNPWPASTSCCVPTARRPLSLLYLDHNGNVVKTDVPDMVVEACGCS

SEQ ID NO: 10 - protein, 345 aa, Homo sapiens
LTGEQLLGSLLRQLQLKEVPTLDRADMEELVIPTHVRAQYVALLQRSHGDRSRGKRFSQSFREVAGRFLALEASTHLLVFGMEQRLPPNSELVQAVLRLFQEPVPKAALHRHGRLSPRSARARVTVEWLRVRDDGSNRTSLIDSRLVSVHESGWKAFDVTEAVNFWQQLSRPRQPLLLQVSVQREHLGPLASGAHKLVRFASQGAPAGLGEPQLELHTLDLGDYGAQGDCDPEAPMTEGTRCCRQEMYIDLQGMKWAENWVLEPPGFLAYECVGTCRQPPEALAFKWPFLGPRQCIASETDSLPMIVSIKEGGRTRPQVVSLPNMRVQKCSCASDGALVPRRLQP

SEQ ID NO: 11 - protein, 345 aa, Homo sapiens
LTEEQLLGSLLRQLQLSEVPVLDRADMEKLVIPAHVRAQYVVLLRRSHGDRSRGKRFSQSFREVAGRFLASEASTHLLVFGMEQRLPPNSELVQAVLRLFQEPVPKAALHRHGRLSPRSAQARVTVEWLRVRDDGSNRTSLIDSRLVSVHESGWKAFDVTEAVNFWQQLSRPRQPLLLQVSVQREHLGPLASGAHKLVRFASQGAPAGLGEPQLELHTLDLRDYGAQGDCDPEAPMTEGTRCCRQEMYIDLQGMKWAKNWVLEPPGFLAYECVGTCQQPPEALAFNWPFLGPRQCIASETASLPMIVSIKEGGRTRPQVVSLPNMRVQKCSCASDGALVPRRLQP

SEQ ID NO: 12 - protein, 279 aa, Homo sapiens
LSLAEASRASFPGPSELHSEDSRFRELRKRYEDLLTRLRANQSWEDSNTDLVPAPAVRILTPEVRLGSGGHLHLRISRAALPEGLPEASRLHRALFRLSPTASRSWDVTRPLRRQLSLARPQAPALHLRLSPPPSQSDQLLAESSSARPQLELHLRPQAARGRRRARARNGDHCPLGPGRCCRLHTVRASLEDLGWADWVLSPREVQVTMCIGACPSQFRAANMHAQIKTSLHRLKPDTVPAPCCVPASYNPMVLIQKTDTGVSLQTYDDLLAKDCHCI

SEQ ID NO: 13 - protein, 542 aa, Homo sapiens
LLGTEALRAEEPAVGTSGLIFREDLDWPPGIPQEPLCLVALGGDSNGSSSPLRVVGALSAYEQAFLGAVQRARWGPRDLATFGVCNTGDRQAALPSLRRLGAWLRDPGGQRLVVLHLEEVTWEPTPSLRFQEPPPGGAGPPELALLVLYPGPGPEVTVTRAGLPGAQSLCPSRDTRYLVLAVDRPAGAWRGSGLALTLQPRGEDSRLSTARLQALLFGDDHRCFTRMTPALLLLPRSEPAPLPAHGQLDTVPFPPPRPSAELEESPPSADPFLETLTRLVRALRVPPARASAPRLALDPDALAGFPQGLVNLSDPAALERLLDGEEPLLLLLRPTAATTGDPAPLHDPTSAPWATALARRVAAELQAAAAELRSLPGLPPATAPLLARLLALCPGGPGGLGDPLRALLLLKALQGLRVEWRGRDPRGPGRAQRSAGATAADGPCALRELSVDLRAERSVLIPETYQANNCQGVCGWPQSDRNPRYGNHVVLLLKMQVRGAALARPPCCVPTAYAGKLLISLSEERISAHHVPNMVATECGCR

SEQ ID NO: 14 - protein, 348 aa, Homo sapiens
CQGLELARELVLAKVRALFLDALGPPAVTREGGDPGVRRLPRRHALGGFTHRGSEPEEEEDVSQAILFPATDASCEDKSAARGLAQEAEEGLFRYMFRPSQHTRSRQVTSAQLWFHTGLDRQGTAASNSSEPLLGLLALSPGGPVAVPMSLGHAPPHWAVLHLATSALSLLTHPVLVLLLRCPLCTCSARPEATPFLVAHTRTRPPSGGERARRSTPLMSWPWSPSALRLLQRPPEEPAAHANCHRVALNISFQELGWERWIVYPPSFIFHYCHGGCGLHIPPNLSLPVPGAPPTPAQPYSLLPGAQPCCAALPGTMRPLHVRTTSDGGYSFKYETVPNLLTQHCACI

SEQ ID NO: 15 - protein, 343 aa, Homo sapiens
PVPPGPAAALLQALGLRDEPQGAPRLRPVPPVMWRLFRRRDPQETRSGSRRTSPGVTLQPCHVEELGVAGNIVRHIPDRGAPTRASEPASAAGHCPEWTVVFDLSAVEPAERPSRARLELRFAAAAAAAPEGGWELSVAQAGQGAGADPGPVLLRQLVPALGPPVRAELLGAAWARNASWPRSLRLALALRPRAPAACARLAEASLLLVTLDPRLCHPLARPRRDAEPVLGGGPGGACRARRLYVSFREVGWHRWVIAPRGFLANYCQGQCALPVALSGSGGPPALNHAVLRALMHAAAPGAADLPCCVPARLSPISVLFFDNSDNVVLRQYEDMVVDECGCR

SEQ ID NO: 16 - protein, 340 aa, Homo sapiens
QEYVFLQFLGLDKAPSPQKFQPVPYILKKIFQDREAAATTGVSRDLCYVKELGVRGNVLRFLPDQGFFLYPKKISQASSCLQKLLYFNLSAIKEREQLTLAQLGLDLGPNSYYNLGPELELALFLVQEPHVWGQTTPKPGKMFVLRSVPWPQGAVHFNLLDVAKDWNDNPRKNFGLFLEILVKEDRDSGVNFQPEDTCARLRCSLHASLLVVTLNPDQCHPSRKRRAAIPVPKLSCKNLCHRHQLFINFRDLGWHKWIIAPKGFMANYCHGECPFSLTISLNSSNYAFMQALMHAVDPEIPQAVCIPTKLSPISMLYQDNNDNVILRHYEDMVVDECGCG

SEQ ID NO: 17 - protein, 474 aa, Homo sapiens
APDLGQRPQGTRPGLAKAEAKERPPLARNVFRPGGHSYGGGATNANARAKGGTGQTGGLTQPKKDEPKKLPPRPGGPEPKPGHPPQTRQATARTVTPKGQLPGGKAPPKAGSVPSSFLLKKAREPGPPREPKEPFRPPPITPHEYMLSLYRTLSDADRKGGNSSVKLEAGLANTITSFIDKGQDDRGPVVRKQRYVFDISALEKDGLLGAELRILRKKPSDTAKPAAPGGGRAAQLKLSSCPSGRQPASLLDVRSVPGLDGSGWEVFDIWKLFRNFKNSAQLCLELEAWERGRAVDLRGLGFDRAARQVHEKALFLVFGRTKKRDLFFNEIKARSGQDDKTVYEYLFSQRRKRRAPLATRQGKRPSKNLKARCSRKALHVNFKDMGWDDWIIAPLEYEAFHCEGLCEFPLRSHLEPTNHAVIQTLMNSMDPESTPPTCCVPTRLSPISILFIDSANNVVYKQYEDMVVESCGCR

SEQ ID NO: 18 - protein, 433 aa, Homo sapiens
FQQASISSSSSSAELGSTKGMRSRKEGKMQRAPRDSDAGREGQEPQPRPQDEPRAQQPRAQEPPGRGPRVVPHEYMLSIYRTYSIAEKLGINASFFQSSKSANTITSFVDRGLDDLSHTPLRRQKYLFDVSMLSDKEELVGAELRLFRQAPSAPWGPPAGPLHVQLFPCLSPLLLDARTLDPQGAPPAGWEVFDVWQGLRHQPWKQLCLELRAAWGELDAGEAEARARGPQQPPPPDLRSLGFGRRVRPPQERALLVVFTRSQRKNLFAEMREQLGSAEAAGPGAGAEGSWPPPSGAPDARPWLPSPGRRRRRTAFASRHGKRHGKKSRLRCSKKPLHVNFKELGWDDWIIAPLEYEAYHCEGVCDFPLRSHLEPTNHAIIQTLMNSMDPGSTPPSCCVPTKLTPISILYIDAGNNVVYKQYEDMVVESCGCR

SEQ ID NO: 19 - protein, 431 aa, Homo sapiens
RDGLEAAAVLRAAGAGPVRSPGGGGGGGGGGRTLAQAAGAAAVPAAAVPRARAARRAAGSGFRNGSVVPHHFMMSLYRSLAGRAPAGAAAVSASGHGRADTITGFTDQATQDESAAETGQSFLFDVSSLNDADEVVGAELRVLRRGSPESGPGSWTSPPLLLLSTCPGAARAPRLLYSRAAEPLVGQRWEAFDVADAMRRHRREPRPPRAFCLLLRAVAGPVPSPLALRRLGFGWPGGGGSAAEERAVLVVSSRTQRKESLFREIRAQARALGAALASEPLPDPGTGTASPRAVIGGRRRRRTALAGTRTAQGSGGGAGRGHGRRGRSRCSRKPLHVDFKELGWDDWIIAPLDYEAYHCEGLCDFPLRSHLEPTNHAIIQTLLNSMAPDAAPASCCVPARLSPISILYIDAANNVVYKQYEDMVVEACGCR

SEQ ID NO: 20 - protein, 403 aa, Homo sapiens
SPIMNLEQSPLEEDMSLFGDVFSEQDGVDFNTLLQSMKDEFLKTLNLSDIPTQDSAKVDPPEYMLELYNKFATDRTSMPSANIIRSFKNEDLFSQPVSFNGLRKYPLLFNVSIPHHEEVIMAELRLYTLVQRDRMIYDGVDRKITIFEVLESKGDNEGERNMLVLVSGEIYGTNSEWETFDVTDAIRRWQKSGSSTHQLEVHIESKHDEAEDASSGRLEIDTSAQNKHNPLLIVFSDDQSSDKERKEELNEMISHEQLPELDNLGLDSFSSGPGEEALLQMRSNIIYDSTARIRRNAKGNYCKRTPLYIDFKEIGWDSWIIAPPGYEAYECRGVCNYPLAEHLTPTKHAIIQALVHLKNSQKASKACCVPTKLEPISILYLDKGVVTYKFKYEGMAVSECGCR

SEQ ID NO: 21 - protein, 407 aa, Homo sapiens
KPLQSWGRGSAGGNAHSPLGVPGGGLPEHTFNLKMFLENVKVDFLRSLNLSGVPSQDKTRVEPPQYMIDLYNRYTSDKSTTPASNIVRSFSMEDAISITATEDFPFQKHILLFNISIPRHEQITRAELRLYVSCQNHVDPSHDLKGSVVIYDVLDGTDAWDSATETKTFLVSQDIQDEGWETLEVSSAVKRWVRSDSTKSKNKLEVTVESHRKGCDTLDISVPPGSRNLPFFVVFSNDHSSGTKETRLELREMISHEQESVLKKLSKDGSTEAGESSHEEDTDGHVAAGSTLARRKRSAGAGSHCQKTSLRVNFEDIGWDSWIIAPKEYEAYECKGGCFFPLADDVTPTKHAIVQTLVHLKFPTKVGKACCVPTKLSPISVLYKDDMGVPTLKYHYEGMSVAECGCR

SEQ ID NO: 22 - protein, 325 aa, Homo sapiens
TVATALLRTRGQPSSPSPLAYMLSLYRDPLPRADIIRSLQAEDVAVDGQNWTFAFDFSFLSQQEDLAWAELRLQLSSPVDLPTEGSLAIEIFHQPKPDTEQASDSCLERFQMDLFTVTLSQVTFSLGSMVLEVTRPLSKWLKRPGALEKQMSRVAGECWPRPPTPPATNVLLMLYSNLSQEQRQLGGSTLLWEAESSWRAQEGQLSWEWGKRHRRHHLPDRSQLCRKVKFQVDFNLIGWGSWIIYPKQYNAYRCEGECPNPVGEEFHPTNHAYIQSLLKRYQPHRVPSTCCAPVKTKPLSMLYVDNGRVLLDHHKDMIVEECGCL

SEQ ID NO: 23 - protein, 373 aa, Homo sapiens
LVPELGRRKFAAASSGRPSSQPSDEVLSEFELRLLSMFGLKQRPTPSRDAVVPPYMLDLYRRHSGQPGSPAPDHRLERAASRANTVRSFHHEESLEELPETSGKTTRRFFFNLSSIPTEEFITSAELQVFREQMQDALGNNSSFHHRINIYEIIKPATANSKFPVTRLLDTRLVNQNASRWESFDVTPAVMRWTAQGHANHGFVVEVAHLEEKQGVSKRHVRISRSLHQDEHSWSQIRPLLVTFGHDGKGHPLHKREKRQAKHKQRKRLKSSCKRHPLYVDFSDVGWNDWIVAPPGYHAFYCHGECPFPLADHLNSTNHAIVQTLVNSVNSKIPKACCVPTELSAISMLYLDENEKVVLKNYQDMVVEGCGCR

SEQ ID NO: 24 - protein, 389 aa, Homo sapiens
GASHASLIPETGKKKVAEIQGHAGGRRSGQSHELLRDFEATLLQMFGLRRRPQPSKSAVIPDYMRDLYRLQSGEEEEEQIHSTGLEYPERPASRANTVRSFHHEEHLENIPGTSENSAFRFLFNLSSIPENEVISSAELRLFREQVDQGPDWERGFHRINIYEVMKPPAEVVPGHLITRLLDTRLVHHNVTRWETFDVSPAVLRWTREKQPNYGLAIEVTHLHQTRTHQGQHVRISRSLPQGSGNWAQLRPLLVTFGHDGRGHALTRRRRAKRSPKHHSQRARKKNKNCRRHSLYVDFSDVGWNDWIVAPPGYQAFYCHGDCPFPLADHLNSTNHAIVQTLVNSVNSSIPKACCVPTELSAISMLYLDEYDKVVLKNYQEMVVEGCGCR

SEQ ID NO: 25 - protein, 424 aa, Homo sapiens
DNHVHSSFIYRRLRNHERREIQREILSILGLPHRPRPFSPGKQASSAPLFMLDLYNAMTNEENPEESEYSVRASLAEETRGARKGYPASPNGYPRRIQLSRTTPLTTQSPPLASLHDTNFLNDADMVMSFVNLVERDKDFSHQRRHYKEFRFDLTQIPHGEAVTAAEFRIYKDRSNNRFENETIKISIYQIIKEYTNRDADLFLLDTRKAQALDVGWLVFDITVTSNHWVINPQNNLGLQLCAETGDGRSINVKSAGLVGRQGPQSKQPFMVAFFKASEVLLRSVRAANKRKNQNRNKSSSHQDSSRMSSVGDYNTSEQKQACKKHELYVSFRDLGWQDWIIAPEGYAAFYCDGECSFPLNAHMNATNHAIVQTLVHLMFPDHVPKPCCAPTKLNAISVLYFDDSSNVILKKYRNMVVRSCGCH

SEQ ID NO: 26 - protein, 493 aa, Homo sapiens
CCGPPPLRPPLPAAAAAAAGGQLLGDGGSPGRTEQPPPSPQSSSGFLYRRLKTQEKREMQKEILSVLGLPHRPRPLHGLQQPQPPALRQQEEQQQQQQLPRGEPPPGRLKSAPLFMLDLYNALSADNDEDGASEGERQQSWPHEAASSSQRRQPPPGAAHPLNRKSLLAPGSGSGGASPLTSAQDSAFLNDADMVMSFVNLVEYDKEFSPRQRHHKEFKFNLSQIPEGEVVTAAEFRIYKDCVMGSFKNQTFLISIYQVLQEHQHRDSDLFLLDTRVVWASEEGWLEFDITATSNLWVVTPQHNMGLQLSVVTRDGVHVHPRAAGLVGRDGPYDKQPFMVAFFKVSEVHVRTTRSASSRRRQQSRNRSTQSQDVARVSSASDYNSSELKTACRKHELYVSFQDLGWQDWIIAPKGYAANYCDGECSFPLNAHMNATNHAIVQTLVHLMNPEYVPKPCCAPTKLNAISVLYFDDNSNVILKKYRNMVVRACGCH

SEQ ID NO: 27 - protein, 402 aa, Homo sapiens
DFSLDNEVHSSFIHRRLRSQERREMQREILSILGLPHRPRPHLQGKHNSAPMFMLDLYNAMAVEEGGGPGGQGFSYPYKAVFSTQGPPLASLQDSHFLTDADMVMSFVNLVEHDKEFFHPRYHHREFRFDLSKIPEGEAVTAAEFRIYKDYIRERFDNETFRISVYQVLQEHLGRESDLFLLDSRTLWASEEGWLVFDITATSNHWVVNPRHNLGLQLSVETLDGQSINPKLAGLIGRHGPQNKQPFMVAFFKATEVHFRSIRSTGSKQRSQNRSKTPKNQEALRMANVAENSSSDQRQACKKHELYVSFRDLGWQDWIIAPEGYAAYYCEGECAFPLNSYMNATNHAIVQTLVHFINPETVPKPCCAPTQLNAISVLYFDDSSNVILKKYRNMVVRACGCH

SEQ ID NO: 28 - protein, 383 aa, Homo sapiens
GGGPGLRPPPGCPQRRLGARERRDVQREILAVLGLPGRPRPRAPPAASRLPASAPLFMLDLYHAMAGDDDEDGAPAEQRLGRADLVMSFVNMVERDRALGHQEPHWKEFRFDLTQIPAGEAVTAAEFRIYKVPSIHLLNRTLHVSMFQVVQEQSNRESDLFFLDLQTLRAGDEGWLVLDVTAASDCWLLKRHKDLGLRLYVETEDGHSVDPGLAGLLGQRAPRSQQPFVVTFFRASPSPIRTPRAVRPLRRRQPKKSNELPQANRLPGIFDDVRGSHGRQVCRRHELYVSFQDLGWLDWVIAPQGYSAYYCEGECSFPLDSCMNATNHAILQSLVHLMKPNAVPKACCAPTKLSATSVLYYDSSNNVILRKHRNMVVKACGCH

SEQ ID NO: 29 - protein, 383 aa, Homo sapiens
GGGPGLRPPPGCPQRRLGARERRDVQREILAVLGLPGRPRPRAPPAASRLPASAPLFMLDLYHAMAGDDDEDGAPAERRLGRADLVMSFVNMVERDRALGHQEPHWKEFRFDLTQIPAGEAVTAAEFRIYKVPSIHLLNRTLHVSMFQVVQEQSNRESDLFFLDLQTLRAGDEGWLVLDVTAASDCWLLKRHKDLGLRLYVETEDGHSVDPGLAGLLGQRAPRSQQPFVVTFFRASPSPIRTPRAVRPLRRRQPKKSNELPQANRLPGIFDDVHGSHGRQVCRRHELYVSFQDLGWLDWVIAPQGYSAYYCEGECSFPLDSCMNATNHAILQSLVHLMMPDAVPKACCAPTKLSATSVLYYDSSNNVILRKHRNMVVKACGCH

SEQ ID NO: 30 - protein, 374 aa, Homo sapiens
MEHRAQMAEGGQSSIALLAEAPTLPLIEELLEESPGEQPRKPRLLGHSLRYMLELYRRSADSHGHPRENRTIGATMVRLVKPLTSVARPHRGTWHIQILGFPLRPNRGLYQLVRATVVYRHHLQLTRFNLSCHVEPWVQKNPTNHFPSSEGDSSKPSLMSNAWKEMDITQLVQQRFWNNKGHRILRLRFMCQQQKDSGGLELWHGTSSLDIAFLLLYFNDTHKSIRKAKFLPRGMEEFMERESLLRRTRQADGISAEVTASSSKHSGPENNQCSLHPFQISFRQLGWDHWIIAPPFYTPNYCKGTCLRVLRDGLNSPNHAIIQNLINQLVDQSVPRPSCVPYKYVPISVLMIEANGSILYKEYEGMIAESCTCR

SEQ ID NO: 31 - protein, 430 aa, Homo sapiens
SQASGGEAQIAASAELESGAMPWSLLQHIDERDRAGLLPALFKVLSVGRGGSPRLQPDSRALHYMKKLYKTYATKEGIPKSNRSHLYNTVRLFTPCTRHKQAPGDQVTGILPSVELLFNLDRITTVEHLLKSVLLYNINNSVSFSSAVKCVCNLMIKEPKSSSRTLGRAPYSFTFNSQFEFGKKHKWIQIDVTSLLQPLVASNKRSIHMSINFTCMKDQLEHPSAQNGLFNMTLVSPSLILYLNDTSAQAYHSWYSLHYKRRPSQGPDQERSLSAYPVGEEAAEDGRSSHHRHRRGQETVSSELKKPLGPASFNLSEYFRQFLLPQNECELHDFRLSFSQLKWDNWIVAPHRYNPRYCKGDCPRAVGHRYGSPVHTMVQNIIYEKLDSSVPRPSCVPAKYSPLSVLTIEPDGSIAYKEYEDMIATKCTCR

SEQ ID NO: 32 - protein, 450 aa, Homo sapiens
ERPKPPFPELRKAVPGDRTAGGGPDSELQPQDKVSEHMLRLYDRYSTVQAARTPGSLEGGSQPWRPRLLREGNTVRSFRAAAAETLERKGLYIFNLTSLTKSENILSATLYFCIGELGNISLSCPVSGGCSHHAQRKHIQIDLSAWTLKFSRNQSQLLGHLSVDMAKSHRDIMSWLSKDITQLLRKAKENEEFLIGFNITSKGRQLPKRRLPFPEPYILVYANDAAISEPESVVSSLQGHRNFPTGTVPKWDSHIRAALSIERRKKRSTGVLLPLQNNELPGAEYQYKKDEVWEERKPYKTLQAQAPEKSKNKKKQRKGPHRKSQTLQFDEQTLKKARRKQWIEPRNCARRYLKVDFADIGWSEWIISPKSFDAYYCSGACQFPMPKSLKPSNHATIQSIVRAVGVVPGIPEPCCVPEKMSSLSILFFDENKNVVLKVYPNMTVESCACR

SEQ ID NO: 33 - protein, 445 aa, Homo sapiens
SHRAPAWSALPAAADGLQGDRDLQRHPGDAAATLGPSAQDMVAVHMHRLYEKYSRQGARPGGGNTVRSFRARLEVVDQKAVYFFNLTSMQDSEMILTATFHFYSEPPRWPRALEVLCKPRAKNASGRPLPLGPPTRQHLLFRSLSQNTATQGLLRGAMALAPPPRGLWQAKDISPIVKAARRDGELLLSAQLDSEERDPGVPRPSPYAPYILVYANDLAISEPNSVAVTLQRYDPFPAGDPEPRAAPNNSADPRVRRAAQATGPLQDNELPGLDERPPRAHAQHFHKHQLWPSPFRALKPRPGRKDRRKKGQEVFMAASQVLDFDEKTMQKARRKQWDEPRVCSRRYLKVDFADIGWNEWIISPKSFDAYYCAGACEFPMPKIVRPSNHATIQSIVRAVGIIPGIPEPCCVPDKMNSLGVLFLDENRNVVLKVYPNMSVDTCACR

SEQ ID NO: 34 - protein, 192 aa, Homo sapiens
FPLPAGKRPPEAPAEDRSLGRRRAPFALSSDSNMPEDYPDQFDDVMDFIQATIKRLKRSPDKQMAVLPRRERNRQAAAANPENSRGKGRRGQRGKNRGCVLTAIHLNVTDLGLGYETKEELIFRYCSGSCDAAETTYDKILKNLSRNRRLVSDKVGQACCRPIAFDDDLSFLDDNLVYHILRKHSAKRCGCI

SEQ ID NO: 35 - protein, 178 aa, Homo sapiens
IWMCREGLLLSHRLGPALVPLHRLPRTLDARIARLAQYRALLQGAPDAMELRELTPWAGRPPGPRRRAGPRRRRARARLGARPCGLRELEVRVSELGLGYASDETVLFRYCAGACEAAARVYDLGLRRLRQRRRLRRERVRAQPCCRPTAYEDEVSFLDAHSRYHTVHELSARECACV

SEQ ID NO: 36 - protein, 135 aa, Homo sapiens
WGPDARGVPVADGEFSSEQVAKAGGTWLGTHRPLARLRRALSGPCQLWSLTLSVAELGLGYASEEKVIFRYCAGSCPRGARTQHGLALARLQGQGRAHGGPCCRPTRYTDVAFLDDRHRWQRLPQLSAAACGCGG

SEQ ID NO: 37 - protein, 181 aa, Homo sapiens
SLGSAPRSPAPREGPPPVLASPAGHLPGGRTARWCSGRARRPPPQPSRPAPPPPAPPSALPRGGRAARAGGPGSRARAAGARGCRLRSQLVPVRALGLGHRSDELVRFRFCSGSCRRARSPHDLSLASLLGAGALRPPPGSRPVSQPCCRPTRYEAVSFMDVNSTWRTVDRLSATACGCLG

SEQ ID NO: 38 - protein, 249 aa, Homo sapiens
LSTCKTIDMELVKRKRIEAIRGQILSKLRLASPPSQGEVPPGPLPEAVLALYNSTRDRVAGESAEPEPEPEADYYAKEVTRVLMVETHNEIYDKFKQSTHSIYMFFNTSELREAVPEPVLLSRAELRLLRLKLKVEQHVELYQKYSNNSWRYLSNRLLAPSDSPEWLSFDVTGVVRQWLSRGGEIEGFRLSAHCSCDSRDNTLQVDINGFTTGRRGDLATIHGMNRPFLLLMATPLERAQHLQSSRHRR

SEQ ID NO: 39 - protein, 283 aa, Homo sapiens
SLSTCSTLDMDQFMRKRIEAIRGQILSKLKLTSPPEDYPEPEEVPPEVISIYNSTRDLLQEKASRRAAACERERSDEEYYAKEVYKIDMPPFFPSENAIPPTFYRPYFRIVRFDVSAMEKNASNLVKAEFRVFRLQNPKARVPEQRIELYQILKSKDLTSPTQRYIDSKVVKTRAEGEWLSFDVTDAVHEWLHHKDRNLGFKISLHCPCCTFVPSNNYIIPNKSEELEARFAGIDGTSTYTSGDQKTIKSTRKKNSGKTPHLLLMLLPSYRLESQQTNRRKKR

SEQ ID NO: 40 - protein, 280 aa, Homo sapiens
SLSLSTCTTLDFGHIKKKRVEAIRGQILSKLRLTSPPEPTVMTHVPYQVLALYNSTRELLEEMHGEREEGCTQENTESEYYAKEIHKFDMIQGLAEHNELAVCPKGITSKVFRFNVSSVEKNRTNLFRAEFRVLRVPNPSSKRNEQRIELFQILRPDEHIAKQRYIGGKNLPTRGTAEWLSFDVTDTVREWLLRRESNLGLEISIHCPCHTFQPNGDILENIHEVMEIKFKGVDNEDDHGRGDLGRLKKQKDHHNPHLILMMIPPHRLDNPGQGGQRKKR

SEQ ID NO: 41 - protein, 45 aa, Homo sapiens
LSTCKTIDMELVKRKRIEAIRGQILSKLRLASPPSQGEVPPGPLP

SEQ ID NO: 42 - protein, 45 aa, Homo sapiens
SLSTCSTLDMDQFMRKRIEAIRGQILSKLKLTSPPEDYPEPEEVP

SEQ ID NO: 43 - protein, 46 aa, Homo sapiens
SLSLSTCTTLDFGHIKKKRVEAIRGQILSKLRLTSPPEPTVMTHVP

SEQ ID NO: 44 - protein, 112 aa, Homo sapiens
ALDTNYCFSSTEKNCCVRQLYIDFRKDLGWKWIHEPKGYHANFCLGPCPYIWSLDTQYSKVLALYNQHNPGASAAPCCVPQALEPLPIVYYVGRKPKVEQLSNMIVRSCKCS

SEQ ID NO: 45 - protein, 112 aa, Homo sapiens
ALDAAYCFRNVQDNCCLRPLYIDFKRDLGWKWIHEPKGYNANFCAGACPYLWSSDTQHSRVLSLYNTINPEASASPCCVSQDLEPLTILYYIGKTPKIEQLSNMIVKSCKCS

SEQ ID NO: 46 - protein, 112 aa, Homo sapiens [sequence omitted]

SEQ ID NO: 47 - protein, 4 aa, Homo sapiens
RHRR

SEQ ID NO: 48 - protein, 4 aa, Homo sapiens
RKKR

SEQ ID NO: 49 - protein, 204 aa, Homo sapiens
EAVLALYNSTRDRVAGESAEPEPEPEADYYAKEVTRVLMVETHNEIYDKFKQSTHSIYMFFNTSELREAVPEPVLLSRAELRLLRLKLKVEQHVELYQKYSNNSWRYLSNRLLAPSDSPEWLSFDVTGVVRQWLSRGGEIEGFRLSAHCSCDSRDNTLQVDINGFTTGRRGDLATIHGMNRPFLLLMATPLERAQHLQSSRHRR

SEQ ID NO: 50 - protein, 238 aa, Homo sapiens
PEVISIYNSTRDLLQEKASRRAAACERERSDEEYYAKEVYKIDMPPFFPSENAIPPTFYRPYFRIVRFDVSAMEKNASNLVKAEFRVFRLQNPKARVPEQRIELYQILKSKDLTSPTQRYIDSKVVKTRAEGEWLSFDVTDAVHEWLHHKDRNLGFKISLHCPCCTFVPSNNYIIPNKSEELEARFAGIDGTSTYTSGDQKTIKSTRKKNSGKTPHLLLMLLPSYRLESQQTNRRKKR

SEQ ID NO: 51 - protein, 234 aa, Homo sapiens
YQVLALYNSTRELLEEMHGEREEGCTQENTESEYYAKEIHKFDMIQGLAEHNELAVCPKGITSKVFRFNVSSVEKNRTNLFRAEFRVLRVPNPSSKRNEQRIELFQILRPDEHIAKQRYIGGKNLPTRGTAEWLSFDVTDTVREWLLRRESNLGLEISIHCPCHTFQPNGDILENIHEVMEIKFKGVDNEDDHGRGDLGRLKKQKDHHNPHLILMMIPPHRLDNPGQGGQRKKR

SEQ ID NO: 52 - protein, 223 aa, Homo sapiens
ELLEEMHGEREEGCTQENTESEYYAKEIHKFDMIQGLAEHNELAVCPKGITSKVFRFNVSSVEKNRTNLFRAEFRVLRVPNPSSKRNEQRIELFQILRPDEHIAKQRYIGGKNLPTRGTAEWLSFDVTDTVREWLLRRESNLGLEISIHCPCHTFQPNGDILENIHEVMEIKFKGVDNEDDHGRGDLGRLKKQKDHHNPHLILMMIPPHRLDNPGQGGQRKKR

SEQ ID NO: 53 - protein, 29 aa, Homo sapiens
CVRQLYIDFRKDLGWKWIHEPKGYHANFC

SEQ ID NO: 54 - protein, 30 aa, Homo sapiens
CLRPLYIDFKRDLGWKWIHEPKGYNANFCA

SEQ ID NO: 55 - protein, 30 aa, Homo sapiens
CVRPLYIDFRQDLGWKWVHEPKGYYANFCS

SEQ ID NO: 56 - protein, 35 aa, Homo sapiens
CVPQALEPLPIVYYVGRKPKVEQLSNMIVRSCKCS

SEQ ID NO: 57 - protein, 35 aa, Homo sapiens
CVSQDLEPLTILYYIGKTPKIEQLSNMIVKSCKCS

SEQ ID NO: 58 - protein, 35 aa, Homo sapiens
CVPQDLEPLTILYYVGRTPKVEQLSNMVVKSCKCS

SEQ ID NO: 59 - protein, 15 aa, Homo sapiens
LASPPSQGEVPPGPL

SEQ ID NO: 60 - protein, 13 aa, Homo sapiens
LTSPPEDYPEPEE

SEQ ID NO: 61 - protein, 13 aa, Homo sapiens
LTSPPEPTVMTHV

SEQ ID NO: 62 - protein, 29 aa, Homo sapiens
LSTCKTIDMELVKRKRIEAIRGQILSKLR

SEQ ID NO: 63 - protein, 29 aa, Homo sapiens
LSTCSTLDMDQFMRKRIEAIRGQILSKLK

SEQ ID NO: 64 - protein, 31 aa, Homo sapiens
LSLSTCTTLDFGHIKKKRVEAIRGQILSKLR

SEQ ID NO: 65 - protein, 20 aa, Homo sapiens
NGFTTGRRGDLATIHGMNRP

SEQ ID NO: 66 - protein, 30 aa, Homo sapiens
FAGIDGTSTYTSGDQKTIKSTRKKNSGKTP

SEQ ID NO: 67 - protein, 25 aa, Homo sapiens
GVDNEDDHGRGDLGRLKKQKDHHNP

SEQ ID NO: 68 - protein, 13 aa, Homo sapiens
CSCDSRDNTLQVD

SEQ ID NO: 69 - protein, 24 aa, Homo sapiens
CPCCTFVPSNNYIIPNKSEELEAR

SEQ ID NO: 70 - protein, 23 aa, Homo sapiens
CPCHTFQPNGDILENIHEVMEIK

SEQ ID NO: 71 - protein, 243 aa, Homo sapiens
NENSEQKENVEKEGLCNACTWRQNTKSSRIEAIKIQILSKLRLETAPNISKDVIRQLLPKAPPLRELIDQYDVQRDDSSDGSLEDDDYHATTETIITMPTESDFLMQVDGKPKCCFFKFSSKIQYNKVVKAQLWIYLRPVETPTTVFVQILRLIKPMKDGTRYTGIRSLKLDMNPGTGIWQSIDVKTVLQNWLKQPESNLGIEIKALDENGHDLAVTFPGPGEDGLNPFLEVKVTDTPKRSRR

SEQ ID NO: 72 - protein, 274 aa, Homo sapiens
AEGPAAAAAAAAAAAAAGVGGERSSRPAPSVAPEPDGCPVCVWRQHSRELRLESIKSQILSKLRLKEAPNISREVVKQLLPKAPPLQQILDLHDFQGDALQPEDFLEEDEYHATTETVISMAQETDPAVQTDGSPLCCHFHFSPKVMFTKVLKAQLWVYLRPVPRPATVYLQILRLKPLTGEGTAGGGGGGRRHIRIRSLKIELHSRSGHWQSIDFKQVLHSWFRQPQSNWGIEINAFDPSGTDLAVTSLGPGAEGLHPFMELRVLENTKRSRR

SEQ ID NO: 73 - protein, 64 aa, Homo sapiens
NENSEQKENVEKEGLCNACTWRQNTKSSRIEAIKIQILSKLRLETAPNISKDVIRQLLPKAPPL

SEQ ID NO: 74 - protein, 86 aa, Homo sapiens
AEGPAAAAAAAAAAAAAGVGGERSSRPAPSVAPEPDGCPVCVWRQHSRELRLESIKSQILSKLRLKEAPNISREVVKQLLPKAPPL

SEQ ID NO: 75 - protein, 109 aa, Homo sapiens
DFGLDCDEHSTESRCCRYPLTVDFEAFGWDWIIAPKRYKANYCSGECEFVFLQKYPHTHLVHQANPRGSAGPCCTPTKMSPINMLYFNGKEQIIYGKIPAMVVDRCGCS

SEQ ID NO: 76 - protein, 109 aa, Homo sapiens
NLGLDCDEHSSESRCCRYPLTVDFEAFGWDWIIAPKRYKANYCSGQCEYMFMQKYPHTHLVQQANPRGSAGPCCTPTKMSPINMLYFNDKQQIIYGKIPGMVVDRCGCS

SEQ ID NO: 77 - protein, 4 aa, Homo sapiens
RSRR

SEQ ID NO: 78 - protein, 179 aa, Homo sapiens
RELIDQYDVQRDDSSDGSLEDDDYHATTETIITMPTESDFLMQVDGKPKCCFFKFSSKIQYNKVVKAQLWIYLRPVETPTTVFVQILRLIKPMKDGTRYTGIRSLKLDMNPGTGIWQSIDVKTVLQNWLKQPESNLGIEIKALDENGHDLAVTFPGPGEDGLNPFLEVKVTDTPKRSRR

SEQ ID NO: 79 - protein, 188 aa, Homo sapiens
QQILDLHDFQGDALQPEDFLEEDEYHATTETVISMAQETDPAVQTDGSPLCCHFHFSPKVMFTKVLKAQLWVYLRPVPRPATVYLQILRLKPLTGEGTAGGGGGGRRHIRIRSLKIELHSRSGHWQSIDFKQVLHSWFRQPQSNWGIEINAFDPSGTDLAVTSLGPGAEGLHPFMELRVLENTKRSRR

SEQ ID NO: 80 - protein, 29 aa, Homo sapiens
CRYPLTVDFEAFGWDWIIAPKRYKANYCS

SEQ ID NO: 81 - protein, 36 aa, Homo sapiens
CTPTKMSPINMLYFNGKEQIIYGKIPAMVVDRCGCS

SEQ ID NO: 82 - protein, 36 aa, Homo sapiens
CTPTKMSPINMLYFNDKQQIIYGKIPGMVVDRCGCS

SEQ ID NO: 83 - protein, 23 aa, Homo sapiens
RLETAPNISKDVIRQLLPKAPPL

SEQ ID NO: 84 - protein, 22 aa, Homo sapiens
RLKEAPNISREVVKQLLPKAPP

SEQ ID NO: 85 - protein, 27 aa, Homo sapiens
GLCNACTWRQNTKSSRIEAIKIQILSK

SEQ ID NO: 86 - protein, 28 aa, Homo sapiens
DGCPVCVWRQHSRELRLESIKSQILSKL

SEQ ID NO: 87 - protein, 14 aa, Homo sapiens
DENGHDLAVTFPGP

SEQ ID NO: 88 - protein, 13 aa, Homo sapiens
DPSGTDLAVTSLG

SEQ ID NO: 89 - protein, 290 aa, Homo sapiens
SPTPGSEGHSAAPDCPSCALAALPKDVPNSQPEMVEAVKKHILNMLHLKKRPDVTQPVPKAALLNAIRKLHVGKVGENGYVEIEDDIGRRAEMNELMEQTSEIITFAESGTARKTLHFEISKEGSDLSVVERAEVWLFLKVPKANRTRTKVTIRLFQQQKHPQGSLDTGEEAEEVGLKGERSELLLSEKVVDARKSTWHVFPVSSSIQRLLDQGKSSLDVRIACEQCQESGASLVLLGKKKKKEEEGEGKKKGGGEGGAGADEEKEQSHRPFLMLQARQSEDHPHRRRRR

SEQ ID NO: 90 - protein, 65 aa, Homo sapiens
SPTPGSEGHSAAPDCPSCALAALPKDVPNSQPEMVEAVKKHILNMLHLKKRPDVTQPVPKAALLN

SEQ ID NO: 91 - protein, 117 aa, Homo sapiens
RGLECDGKVNICCKKQFFVSFKDIGWNDWIIAPSGYHANYCEGECPSHIAGTSGSSLSFHSTVINHYRMRGHSPFANLKSCCVPTKLRPMSMLYYDDGQNIIKKDIQNMIVEECGCS

SEQ ID NO: 92 - protein, 4 aa, Homo sapiens
RRRR

SEQ ID NO: 93 - protein, 227 aa, Homo sapiens
LNAIRKLHVGKVGENGYVEIEDDIGRRAEMNELMEQTSEIITFAESGTARKTLHFEISKEGSDLSVVERAEVWLFLKVPKANRTRTKVTIRLFQQQKHPQGSLDTGEEAEEVGLKGERSELLLSEKVVDARKSTWHVFPVSSSIQRLLDQGKSSLDVRIACEQCQESGASLVLLGKKKKKEEEGEGKKKGGGEGGAGADEEKEQSHRPFLMLQARQSEDHPHRRRRR

SEQ ID NO: 94 - protein, 28 aa, Homo sapiens
KKQFFVSFKDIGWNDWIIAPSGYHANYC

SEQ ID NO: 95 - protein, 36 aa, Homo sapiens
CVPTKLRPMSMLYYDDGQNIIKKDIQNMIVEECGCS

SEQ ID NO: 96 - protein, 17 aa, Homo sapiens
LKKRPDVTQPVPKAALL

SEQ ID NO: 97 - protein, 28 aa, Homo sapiens
ALAALPKDVPNSQPEMVEAVKKHILNML

SEQ ID NO: 98 - protein, 33 aa, Homo sapiens
QESGASLVLLGKKKKKEEEGEGKKKGGGEGGAG

SEQ ID NO: 99 - protein, 22 aa, Homo sapiens
MDMRVPAQLLGLLLLWFSGVLG

SEQ ID NO: 100 - protein, 8 aa, Artificial Sequence
  Description of Artificial Sequence: Synthetic peptide
DYKDDDDK

SEQ ID NO: 101 - protein, 8 aa, Artificial Sequence
  Description of Artificial Sequence: Synthetic peptide
LEVLFQGP

SEQ ID NO: 102 - protein, 6 aa, Artificial Sequence
  Description of Artificial Sequence: Synthetic 6xHis tag
HHHHHH

SEQ ID NO: 103 - protein, 361 aa, Homo sapiens
LSTSKTIDMELVKRKRIEAIRGQILSKLRLASPPSQGEVPPGPLPEAVLALYNSTRDRVAGESAEPEPEPEADYYAKEVTRVLMVETHNEIYDKFKQSTHSIYMFFNTSELREAVPEPVLLSRAELRLLRLKLKVEQHVELYQKYSNNSWRYLSNRLLAPSDSPEWLSFDVTGVVRQWLSRGGEIEGFRLSAHCSCDSRDNTLQVDINGFTTGRRGDLATIHGMNRPFLLLMATPLERAQHLQSSRHRRALDTNYCFSSTEKNCCVRQLYIDFRKDLGWKWIHEPKGYHANFCLGPCPYIWSLDTQYSKVLALYNQHNPGASAAPCCVPQALEPLPIVYYVGRKPKVEQLSNMIVRSCKCS

SEQ ID NO: 104 - protein, 249 aa, Homo sapiens
LSTSKTIDMELVKRKRIEAIRGQILSKLRLASPPSQGEVPPGPLPEAVLALYNSTRDRVAGESAEPEPEPEADYYAKEVTRVLMVETHNEIYDKFKQSTHSIYMFFNTSELREAVPEPVLLSRAELRLLRLKLKVEQHVELYQKYSNNSWRYLSNRLLAPSDSPEWLSFDVTGVVRQWLSRGGEIEGFRLSAHCSCDSRDNTLQVDINGFTTGRRGDLATIHGMNRPFLLLMATPLERAQHLQSSRHRR

SEQ ID NO: 105 - protein, 360 aa, Homo sapiens
LSTCKTIDMELVKRKRIEAIRGQILSKLRLASPPSQGEVPPGPLPEAVLALYNSTRDRVAGESAEPEPEPEADYYAKEVTRVLMVETHNEIYDKFKQSTHSIYMFFNTSELREAVPEPVLLSRAELRLLRLKLKVEQHVELYQKYSNNSWRYLSNRLLAPSDSPEWLSFDVTGVVRQWLSRGGEIEGFRLSAHCSCDSRDNTLQVDINGFTTGRRGDLATIHGMNRPFLLLMATPLERAQHLQSSRHGALDTNYCFSSTEKNCCVRQLYIDFRKDLGWKWIHEPKGYHANFCLGPCPYIWSLDTQYSKVLALYNQHNPGASAAPCCVPQALEPLPIVYYVGRKPKVEQLSNMIVRSCKCS

SEQ ID NO: 106 - protein, 360 aa, Homo sapiens
LSTSKTIDMELVKRKRIEAIRGQILSKLRLASPPSQGEVPPGPLPEAVLALYNSTRDRVAGESAEPEPEPEADYYAKEVTRVLMVETHNEIYDKFKQSTHSIYMFFNTSELREAVPEPVLLSRAELRLLRLKLKVEQHVELYQKYSNNSWRYLSNRLLAPSDSPEWLSFDVTGVVRQWLSRGGEIEGFRLSAHCSCDSRDNTLQVDINGFTTGRRGDLATIHGMNRPFLLLMATPLERAQHLQSSRHGALDTNYCFSSTEKNCCVRQLYIDFRKDLGWKWIHEPKGYHANFCLGPCPYIWSLDTQYSKVLALYNQHNPGASAAPCCVPQALEPLPIVYYVGRKPKVEQLSNMIVRSCKCS

SEQ ID NO: 107 - protein, 395 aa, Homo sapiens
SLSTSSTLDMDQFMRKRIEAIRGQILSKLKLTSPPEDYPEPEEVPPEVISIYNSTRDLLQEKASRRAAACERERSDEEYYAKEVYKIDMPPFFPSENAIPPTFYRPYFRIVRFDVSAMEKNASNLVKAEFRVFRLQNPKARVPEQRIELYQILKSKDLTSPTQRYIDSKVVKTRAEGEWLSFDVTDAVHEWLHHKDRNLGFKISLHCPCCTFVPSNNYIIPNKSEELEARFAGIDGTSTYTSGDQKTIKSTRKKNSGKTPHLLLMLLPSYRLESQQTNRRKKRALDAAYCFRNVQDNCCLRPLYIDFKRDLGWKWIHEPKGYNANFCAGACPYLWSSDTQHSRVLSLYNTINPEASASPCCVSQDLEPLTILYYIGKTPKIEQLSNMIVKSCKCS

SEQ ID NO: 108 - protein, 283 aa, Homo sapiens
SLSTSSTLDMDQFMRKRIEAIRGQILSKLKLTSPPEDYPEPEEVPPEVISIYNSTRDLLQEKASRRAAACERERSDEEYYAKEVYKIDMPPFFPSENAIPPTFYRPYFRIVRFDVSAMEKNASNLVKAEFRVFRLQNPKARVPEQRIELYQILKSKDLTSPTQRYIDSKVVKTRAEGEWLSFDVTDAVHEWLHHKDRNLGFKISLHCPCCTFVPSNNYIIPNKSEELEARFAGIDGTSTYTSGDQKTIKSTRKKNSGKTPHLLLMLLPSYRLESQQTNRRKKR

SEQ ID NO: 109 - protein, 394 aa, Homo sapiens
SLSTSSTLDMDQFMRKRIEAIRGQILSKLKLTSPPEDYPEPEEVPPEVISIYNSTRDLLQEKASRRAAACERERSDEEYYAKEVYKIDMPPFFPSENAIPPTFYRPYFRIVRFDVSAMEKNASNLVKAEFRVFRLQNPKARVPEQRIELYQILKSKDLTSPTQRYIDSKVVKTRAEGEWLSFDVTDAVHEWLHHKDRNLGFKISLHCPCCTFVPSNNYIIPNKSEELEARFAGIDGTSTYTSGDQKTIKSTRKKNSGKTPHLLLMLLPSYRLESQQTNRRKGALDAAYCFRNVQDNCCLRPLYIDFKRDLGWKWIHEPKGYNANFCAGACPYLWSSDTQHSRVLSLYNTINPEASASPCCVSQDLEPLTILYYIGKTPKIEQLSNMIVKSCKCS

SEQ ID NO: 110 - protein, 394 aa, Homo sapiens
SLSTCSTLDMDQFMRKRIEAIRGQILSKLKLTSPPEDYPEPEEVPPEVISIYNSTRDLLQEKASRRAAACERERSDEEYYAKEVYKIDMPPFFPSENAIPPTFYRPYFRIVRFDVSAMEKNASNLVKAEFRVFRLQNPKARVPEQRIELYQILKSKDLTSPTQRYIDSKVVKTRAEGEWLSFDVTDAVHEWLHHKDRNLGFKISLHCPCCTFVPSNNYIIPNKSEELEARFAGIDGTSTYTSGDQKTIKSTRKKNSGKTPHLLLMLLPSYRLESQQTNRRKGALDAAYCFRNVQDNCCLRPLYIDFKRDLGWKWIHEPKGYNANFCAGACPYLWSSDTQHSRVLSLYNTINPEASASPCCVSQDLEPLTILYYIGKTPKIEQLSNMIVKSCKCS

SEQ ID NO: 111 - protein, 392 aa, Homo sapiens
SLSLSTSTTLDFGHIKKKRVEAIRGQILSKLRLTSPPEPTVMTHVPYQVLALYNSTRELLEEMHGEREEGCTQENTESEYYAKEIHKFDMIQGLAEHNELAVCPKGITSKVFRFNVSSVEKNRTNLFRAEFRVLRVPNPSSKRNEQRIELFQILRPDEHIAKQRYIGGKNLPTRGTAEWLSFDVTDTVREWLLRRESNLGLEISIHCPCHTFQPNGDILENIHEVMEIKFKGVDNEDDHGRGDLGRLKKQKDHHNPHLILMMIPPHRLDNPGQGGQRKKRALDTNYCFRNLEENCCVRPLYIDFRQDLGWKWVHEPKGYYANFCSGPCPYLRSADTTHSTVLGLYNTLNPEASASPCCVPQDLEPLTILYYVGRTPKVEQLSNMVVKSCKCS

SEQ ID NO: 112 - protein, 280 aa, Homo sapiens
SLSLSTSTTLDFGHIKKKRVEAIRGQILSKLRLTSPPEPTVMTHVPYQVLALYNSTRELLEEMHGEREEGCTQENTESEYYAKEIHKFDMIQGLAEHNELAVCPKGITSKVFRFNVSSVEKNRTNLFRAEFRVLRVPNPSSKRNEQRIELFQILRPDEHIAKQRYIGGKNLPTRGTAEWLSFDVTDTVREWLLRRESNLGLEISIHCPCHTFQPNGDILENIHEVMEIKFKGVDNEDDHGRGDLGRLKKQKDHHNPHLILMMIPPHRLDNPGQGGQRKKR

SEQ ID NO: 113 - protein, 391 aa, Homo sapiens
SLSLSTSTTLDFGHIKKKRVEAIRGQILSKLRLTSPPEPTVMTHVPYQVLALYNSTRELLEEMHGEREEGCTQENTESEYYAKEIHKFDMIQGLAEHNELAVCPKGITSKVFRFNVSSVEKNRTNLFRAEFRVLRVPNPSSKRNEQRIELFQILRPDEHIAKQRYIGGKNLPTRGTAEWLSFDVTDTVREWLLRRESNLGLEISIHCPCHTFQPNGDILENIHEVMEIKFKGVDNEDDHGRGDLGRLKKQKDHHNPHLILMMIPPHRLDNPGQGGQRKGALDTNYCFRNLEENCCVRPLYIDFRQDLGWKWVHEPKGYYANFCSGPCPYLRSADTTHSTVLGLYNTLNPEASASPCCVPQDLEPLTILYYVGRTPKVEQLSNMVVKSCKCS

SEQ ID NO: 114 - protein, 391 aa, Homo sapiens
SLSLSTCTTLDFGHIKKKRVEAIRGQILSKLRLTSPPEPTVMTHVPYQVLALYNSTRELLEEMHGEREEGCTQENTESEYYAKEIHKFDMIQGLAEHNELAVCPKGITSKVFRFNVSSVEKNRTNLFRAEFRVLRVPNPSSKRNEQRIELFQILRPDEHIAKQRYIGGKNLPTRGTAEWLSFDVTDTVREWLLRRESNLGLEISIHCPCHTFQPNGDILENIHEVMEIKFKGVDNEDDHGRGDLGRLKKQKDHHNPHLILMMIPPHRLDNPGQGGQRKGALDTNYCFRNLEENCCVRPLYIDFRQDLGWKWVHEPKGYYANFCSGPCPYLRSADTTHSTVLGLYNTLNPEASASPCCVPQDLEPLTILYYVGRTPKVEQLSNMVVKSCKCS

SEQ ID NO: 115 - protein, 361 aa, Artificial Sequence
  Description of Artificial Sequence: Synthetic polypeptide
LSTCKTIDMELVKRKRIEAIRGQILSKLRLASPPSQGEVPPGPLPEAVLALHNSTRDRVAGESAEPEPEPEADYYAKEVTRVLMVETHNEIYDKFKQSTHSIYMFFNTSELREAVPEPVLLSRAELRLLRLKLKVEQHVELYQKYSNNSWRYLSNRLLAPSDSPEWLSFDVTGVVRQWLSRGGEIEGFRLSAHCSCDSRDNTLQVDINGFTTGRRGDLATIHGMNRPFLLLMATPLERAQHLQSSRHRRALDTNYCFSSTEKNCCVRQLYIDFRKDLGWKWIHEPKGYHANFCLGPCPYIWSLDTQYSKVLALYNQHNPGASAAPCCVPQALEPLPIVYYVGRKPKVEQLSNMIVRSCKCS

SEQ ID NO: 116 - protein, 361 aa, Artificial Sequence
  Description of Artificial Sequence: Synthetic polypeptide
LSTCKTIDMELVKRKRIEAIRGQILSKLRLASPPSQGEVPPGPLPEAVLALYNSTRDRVAGESAEPEPEPEADYYAKEVTRVLMVETHNEIYDKFKQSTHSIYMFFNTSELREAVPEPVLLSRAELRLLRLKLKVEQHVELYQKYSNNSWRYLSNRLLAPSDSPEWLSFDVTGVVRQWLSRGGEIEGFCLSAHCSCDSRDNTLQVDINGFTTGRRGDLATIHGMNRPFLLLMATPLERAQHLQSSRHRRALDTNYCFSSTEKNCCVRQLYIDFRKDLGWKWIHEPKGYHANFCLGPCPYIWSLDTQYSKVLALYNQHNPGASAAPCCVPQALEPLPIVYYVGRKPKVEQLSNMIVRSCKCS

SEQ ID NO: 117 - protein, 361 aa, Artificial Sequence
  Description of Artificial Sequence: Synthetic polypeptide
LSTCKTIDMELVKRKRIEAIRGQILSKLRLASPPSQGEVPPGPLPEAVLALYNSTRDRVAGESAEPEPEPEADYYAKEVTRVLMVETHNEIYDKFKQSTHSIYMFFNTSELREAVPEPVLLSRAELRLLRLKLKVEQHVELYQKYSNNSWRYLSNRLLAPSDSPEWLSFDVTGVVRQWLSRGGEIEGFRLSADCSCDSRDNTLQVDINGFTTGRRGDLATIHGMNRPFLLLMATPLERAQHLQSSRHRRALDTNYCFSSTEKNCCVRQLYIDFRKDLGWKWIHEPKGYHANFCLGPCPYIWSLDTQYSKVLALYNQHNPGASAAPCCVPQALEPLPIVYYVGRKPKVEQLSNMIVRSCKCS

SEQ ID NO: 118 - protein, 361 aa, Artificial Sequence
  Description of Artificial Sequence: Synthetic polypeptide
LSTCKTIDMELVKRKRIEAIRGQILSKLRLASPPSQGEVPPGPLPEAVLALYNSTRDRVAGESAEPEPEPEADYYAKEVTRVLMVETHNEIYDKFKQSTHSIYMFFNTSELREAVPEPVLLSRAELRLLRLKLKVEQHVELYQKYSNNSWRYLSNRLLAPSDSPEWLSFDVTGVVRQWLSRGGEIEGFRLSAHRSCDSRDNTLQVDINGFTTGRRGDLATIHGMNRPFLLLMATPLERAQHLQSSRHRRALDTNYCFSSTEKNCCVRQLYIDFRKDLGWKWIHEPKGYHANFCLGPCPYIWSLDTQYSKVLALYNQHNPGASAAPCCVPQALEPLPIVYYVGRKPKVEQLSNMIVRSCKCS

SEQ ID NO: 119 - protein, 361 aa, Artificial Sequence
  Description of Artificial Sequence: Synthetic polypeptide
LSTCKTIDMELVKRKRIEAIRGQILSKLRLASPPSQGEVPPGPLPEAVLALYNSTRDRVAGESAEPEPEPEADYYAKEVTRVLMVETHNEIYDKFKQSTHSIYMFFNTSELREAVPEPVLLSRAELRLLRLKLKVEQHVELYQKYSNNSWRYLSNRLLAPSDSPEWLSFDVTGVVRQWLSRGGEIEGFRLSAHCSRDSRDNTLQVDINGFTTGRRGDLATIHGMNRPFLLLMATPLERAQHLQSSRHRRALDTNYCFSSTEKNCCVRQLYIDFRKDLGWKWIHEPKGYHANFCLGPCPYIWSLDTQYSKVLALYNQHNPGASAAPCCVPQALEPLPIVYYVGRKPKVEQLSNMIVRSCKCS

SEQ ID NO: 120 - protein, 361 aa, Artificial Sequence
  Description of Artificial Sequence: Synthetic polypeptide
LSTCKTIDMELVKRKRIEAIRGQILSKLRLASPPSQGEVPPGPLPEAVLALYNSTRDRVAGESAEPEPEPEADYYAKEVTRVLMVETHNEIYDKFKQSTHSIYMFFNTSELREAVPEPVLLSRAELRLLRLKLKVEQHVELYQKYSNNSWRYLSNRLLAPSDSPEWLSFDVTGVVRQWLSRGGEIEGFRLSAHRSRDSRDNTLQVDINGFTTGRRGDLATIHGMNRPFLLLMATPLERAQHLQSSRHRRALDTNYCFSSTEKNCCVRQLYIDFRKDLGWKWIHEPKGYHANFCLGPCPYIWSLDTQYSKVLALYNQHNPGASAAPCCVPQALEPLPIVYYVGRKPKVEQLSNMIVRSCKCS

SEQ ID NO: 121 - protein, 361 aa, Mus sp.
LSTCKTIDMELVKRKRIEAIRGQILSKLRLASPPSQGEVPPGPLPEAVLALYNSTRDRVAGESADPEPEPEADYYAKEVTRVLMVDRNNAIYEKTKDISHSIYMFFNTSDIREAVPEPPLLSRAELRLQRLKSSVEQHVELYQKYSNNSWRYLGNRLLTPTDTPEWLSFDVTGVVRQWLNQGDGIQGFRFSAHCSCDSKDNKLHVEINGISPKRRGDLGTIHDMNRPFLLLMATPLERAQHLHSSRHRRALDTNYCFSSTEKNCCVRQLYIDFRKDLGWKWIHEPKGYHANFCLGPCPYIWSLDTQYSKVLALYNQHNPGASASPCCVPQALEPLPIVYYVGRKPKVEQLSNMIVRSCKCS

SEQ ID NO: 122 - protein, 361 aa, Macaca fascicularis
LSTCKTIDMELVKRKRIEAIRGQILSKLRLASPPSQGEVPPGPLPEAVLALYNSTRDRVAGESAEPEPEPEADYYAKEVTRVLMVETHNEIYDKFKQSTHSIYMFFNTSELREAVPEPVLLSRAELRLLRLKLKVEQHVELYQKYSNNSWRYLSNRLLAPSDSPEWLSFDVTGVVRQWLSRGGEIEGFRLSAHCSCDSKDNTLQVDINGFTTGRRGDLATIHGMNRPFLLLMATPLERAQHLQSSRHRRALDTNYCFSSTEKNCCVRQLYIDFRKDLGWKWIHEPKGYHANFCLGPCPYIWSLDTQYSKVLALYNQHNPGASAAPCCVPQALEPLPIVYYVGRKPKVEQLSNMIVRSCKCS

SEQ ID NO: 123 - protein, 249 aa, Mus sp.
LSTSKTIDMELVKRKRIEAIRGQILSKLRLASPPSQGEVPPGPLPEAVLALYNSTRDRVAGESADPEPEPEADYYAKEVTRVLMVDRNNAIYEKTKDISHSIYMFFNTSDIREAVPEPPLLSRAELRLQRLKSSVEQHVELYQKYSNNSWRYLGNRLLTPTDTPEWLSFDVTGVVRQWLNQGDGIQGFRFSAHCSCDSKDNKLHVEINGISPKRRGDLGTIHDMNRPFLLLMATPLERAQHLHSSRHRR

SEQ ID NO: 124 - protein, 249 aa, Macaca fascicularis
LSTSKTIDMELVKRKRIEAIRGQILSKLRLASPPSQGEVPPGPLPEAVLALYNSTRDRVAGESAEPEPEPEADYYAKEVTRVLMVETHNEIYDKFKQSTHSIYMFFNTSELREAVPEPVLLSRAELRLLRLKLKVEQHVELYQKYSNNSWRYLSNRLLAPSDSPEWLSFDVTGVVRQWLSRGGEIEGFRLSAHCSCDSKDNTLQVDINGFTTGRRGDLATIHGMNRPFLLLMATPLERAQHLQSSRHRR

SEQ ID NO: 125 - protein, 360 aa, Mus sp.
LSTSKTIDMELVKRKRIEAIRGQILSKLRLASPPSQGEVPPGPLPEAVLALYNSTRDRVAGESADPEPEPEADYYAKEVTRVLMVDRNNAIYEKTKDISHSIYMFFNTSDIREAVPEPPLLSRAELRLQRLKSSVEQHVELYQKYSNNSWRYLGNRLLTPTDTPEWLSFDVTGVVRQWLNQGDGIQGFRFSAHCSCDSKDNKLHVEINGISPKRRGDLGTIHDMNRPFLLLMATPLERAQHLHSSRHGALDTNYCFSSTEKNCCVRQLYIDFRKDLGWKWIHEPKGYHANFCLGPCPYIWSLDTQYSKVLALYNQHNPGASASPCCVPQALEPLPIVYYVGRKPKVEQLSNMIVRSCKCS

SEQ ID NO: 126 - protein, 361 aa, Mus sp.
LSTSKTIDMELVKRKRIEAIRGQILSKLRLASPPSQGEVPPGPLPEAVLALYNSTRDRVAGESADPEPEPEADYYAKEVTRVLMVDRNNAIYEKTKDISHSIYMFFNTSDIREAVPEPPLLSRAELRLQRLKSSVEQHVELYQKYSNNSWRYLGNRLLTPTDTPEWLSFDVTGVVRQWLNQGDGIQGFRFSAHCSCDSKDNKLHVEINGISPKRRGDLGTIHDMNRPFLLLMATPLERAQHLHSSRHRRALDTNYCFSSTEKNCCVRQLYIDFRKDLGWKWIHEPKGYHANFCLGPCPYIWSLDTQYSKVLALYNQHNPGASASPCCVPQALEPLPIVYYVGRKPKVEQLSNMIVRSCKCS

SEQ ID NO: 127 - protein, 361 aa, Macaca fascicularis
LSTSKTIDMELVKRKRIEAIRGQILSKLRLASPPSQGEVPPGPLPEAVLALYNSTRDRVAGESAEPEPEPEADYYAKEVTRVLMVETHNEIYDKFKQSTHSIYMFFNTSELREAVPEPVLLSRAELRLLRLKLKVEQHVELYQKYSNNSWRYLSNRLLAPSDSPEWLSFDVTGVVRQWLSRGGEIEGFRLSAHCSCDSKDNTLQVDINGFTTGRRGDLATIHGMNRPFLLLMATPLERAQHLQSSRHRRALDTNYCFSSTEKNCCVRQLYIDFRKDLGWKWIHEPKGYHANFCLGPCPYIWSLDTQYSKVLALYNQHNPGASAAPCCVPQALEPLPIVYYVGRKPKVEQLSNMIVRSCKCS

SEQ ID NO: 128 - protein, 360 aa, Macaca fascicularis
LSTSKTIDMELVKRKRIEAIRGQILSKLRLASPPSQGEVPPGPLPEAVLALYNSTRDRVAGESAEPEPEPEADYYAKEVTRVLMVETHNEIYDKFKQSTHSIYMFFNTSELREAVPEPVLLSRAELRLLRLKLKVEQHVELYQKYSNNSWRYLSNRLLAPSDSPEWLSFDVTGVVRQWLSRGGEIEGFRLSAHCSCDSKDNTLQVDINGFTTGRRGDLATIHGMNRPFLLLMATPLERAQHLQSSRHGALDTNYCFSSTEKNCCVRQLYIDFRKDLGWKWIHEPKGYHANFCLGPCPYIWSLDTQYSKVLALYNQHNPGASAAPCCVPQALEPLPIVYYVGRKPKVEQLSNMIVRSCKCS

SEQ ID NO: 129 - protein, 645 aa, Macaca fascicularis
AQHQDKVACKMVDKKVSCQGLGLLQVPLVLPPDTETLDLSGNQLRSILASPLGFYTALRHLDLSTNEINFLQPGAFQALTHLEHLSLAHNRLAMATALSAGGLGPLPRVTSLDLSGNSLYSGLLERLLGEAPSLHTLSLAENSLTRLTRHTFRDMPALEQLDLHSNVLMDIEDGAFEGLPHLTHLNLSRNSLTCISDFSLQQLRVLDLSCNSIEAFQTASQPQAEFQLTWLDLRENKLLHFPDLAALPRLIYLNLSNNLIRLPTGPPQDSKGIHAPSEGWSALPLSTPNGNVSARPLSQLLNLDLSYNEIELIPDSFLEHLTSLCFLNLSRNCLRTFEARRSGSLPCLMLLDLSHNALETLELGARALGSLRTLLLQGNALRDLPPYTFANLASLQRLNLQGNRVSPCGGPNEPGPASCVAFSGIASLRSLSLVDNEIELLRAGAFLHTPLTELDLSSNPGLEVATGALTGLEASLEVLALQGNGLTVLQVDLPCFICLKRLNLAENRLSHLPAWTQAVSLEVLDLRNNSFSLLPGSAMGGLETSLRRLYLQGNPLSCCGNGWLAAQLHQGRVDVDATQDLICRFSSQEEVSLSHVRPEDCEKGGLKNINLIIILTFILVSAILLTTLATCCCVRRQKFNQQYKA

SEQ ID NO: 130 - protein, 352 aa, Mus sp.
NEGSEREENVEKEGLCNACAWRQNTRYSRIEAIKIQILSKLRLETAPNISKDAIRQLLPRAPPLRELIDQYDVQRDDSSDGSLEDDDYHATTETIITMPTESDFLMQADGKPKCCFFKFSSKIQYNKVVKAQLWIYLRPVKTPTTVFVQILRLIKPMKDGTRYTGIRSLKLDMSPGTGIWQSIDVKTVLQNWLKQPESNLGIEIKALDENGHDLAVTFPGPGEDGLNPFLEVKVTDTPKRSRRDFGLDCDEHSTESRCCRYPLTVDFEAFGWDWIIAPKRYKANYCSGECEFVFLQKYPHTHLVHQANPRGSAGPCCTPTKMSPINMLYFNGKEQIIYGKIPAMVVDRCGCS

SEQ ID NO: 131 - protein, 352 aa, Mus sp.
NEGSEREENVEKEGLCNACAWRQNTRYSRIEAIKIQILSKLRLETAPNISKDAIRQLLPRAPPLRELIDQYDVQRDDSSDGSLEDDDYHATTETIITMPTESDFLMQADGKPKCCFFKFSSKIQYNKVVKAQLWIYLRPVKTPTTVFVQILRLIKPMKDGTRYTGIRSLKLDMSPGTGIWQSIDVKTVLQNWLKQPESNLGIEIKALDENGHDLAVTFPGPGEDGLNPFLEVKVTDTPKASRADFGLDCDEHSTESRCCRYPLTVDFEAFGWDWIIAPKRYKANYCSGECEFVFLQKYPHTHLVHQANPRGSAGPCCTPTKMSPINMLYFNGKEQIIYGKIPAMVVDRCGCS

SEQ ID NO: 132 - protein, 352 aa, Mus sp.
NEGSEREENVEKEGLCNACAWRQNTRYSRIEAIKIQILSKLRLETAPNISKDAIRQLLPRAPPLRELIDQYDVQRADSSDGSLEDDDYHATTETIITMPTESDFLMQADGKPKCCFFKFSSKIQYNKVVKAQLWIYLRPVKTPTTVFVQILRLIKPMKDGTRYTGIRSLKLDMSPGTGIWQSIDVKTVLQNWLKQPESNLGIEIKALDENGHDLAVTFPGPGEDGLNPFLEVKVTDTPKRSRRDFGLDCDEHSTESRCCRYPLTVDFEAFGWDWIIAPKRYKANYCSGECEFVFLQKYPHTHLVHQANPRGSAGPCCTPTKMSPINMLYFNGKEQIIYGKIPAMVVDRCGCS

SEQ ID NO: 133 - protein, 352 aa, Mus sp.
NEGSEREENVEKEGLCNACAWRQNTRYSRIEAIKIQILSKLRLETAPNISKDAIRQLLPRAPPLRELIDQYDVQRADSSDGSLEDDDYHATTETIITMPTESDFLMQADGKPKCCFFKFSSKIQYNKVVKAQLWIYLRPVKTPTTVFVQILRLIKPMKDGTRYTGIRSLKLDMSPGTGIWQSIDVKTVLQNWLKQPESNLGIEIKALDENGHDLAVTFPGPGEDGLNPFLEVKVTDTPKASRADFGLDCDEHSTESRCCRYPLTVDFEAFGWDWIIAPKRYKANYCSGECEFVFLQKYPHTHLVHQANPRGSAGPCCTPTKMSPINMLYFNGKEQIIYGKIPAMVVDRCGCS

SEQ ID NO: 134 - protein, 243 aa, Mus sp.
NEGSEREENVEKEGLCNACAWRQNTRYSRIEAIKIQILSKLRLETAPNISKDAIRQLLPRAPPLRELIDQYDVQRDDSSDGSLEDDDYHATTETIITMPTESDFLMQADGKPKCCFFKFSSKIQYNKVVKAQLWIYLRPVKTPTTVFVQILRLIKPMKDGTRYTGIRSLKLDMSPGTGIWQSIDVKTVLQNWLKQPESNLGIEIKALDENGHDLAVTFPGPGEDGLNPFLEVKVTDTPKRSRR

SEQ ID NO: 135 - protein, 243 aa, Mus sp.
NEGSEREENVEKEGLCNACAWRQNTRYSRIEAIKIQILSKLRLETAPNISKDAIRQLLPRAPPLRELIDQYDVQRADSSDGSLEDDDYHATTETIITMPTESDFLMQADGKPKCCFFKFSSKIQYNKVVKAQLWIYLRPVKTPTTVFVQILRLIKPMKDGTRYTGIRSLKLDMSPGTGIWQSIDVKTVLQNWLKQPESNLGIEIKALDENGHDLAVTFPGPGEDGLNPFLEVKVTDTPKRSRR

SEQ ID NO: 136 - protein, 352 aa, Macaca fascicularis
NENSEQKENVEKEGLCNACTWRQNTKSSRIEAIKIQILSKLRLETAPNISKDAIRQLLPKAPPLRELIDQYDVQRDDSSDGSLEDDDYHATTETIITMPTESDFLMQVDGKPKCCFFKFSSKIQYNKVVKAQLWIYLRPVETPTTVFVQILRLIKPMKDGTRYTGIRSLKLDMNPGTGIWQSIDVKTVLQNWLKQPESNLGIEIKALDENGHDLAVTFPGPGEDGLNPFLEVKVTDTPKRSRRDFGLDCDEHSTESRCCRYPLTVDFEAFGWDWIIAPKRYKANYCSGECEFVFLQKYPHTHLVHQANPRGSAGPCCTPTKMSPINMLYFNGKEQIIYGKIPAMVVDRCGCS

SEQ ID NO: 137 - protein, 352 aa, Macaca fascicularis
NENSEQKENVEKEGLCNACTWRQNTKSSRIEAIKIQILSKLRLETAPNISKDAIRQLLPKAPPLRELIDQYDVQRDDSSDGSLEDDDYHATTETIITMPTESDFLMQVDGKPKCCFFKFSSKIQYNKVVKAQLWIYLRPVETPTTVFVQILRLIKPMKDGTRYTGIRSLKLDMNPGTGIWQSIDVKTVLQNWLKQPESNLGIEIKALDENGHDLAVTFPGPGEDGLNPFLEVKVTDTPKASRADFGLDCDEHSTESRCCRYPLTVDFEAFGWDWIIAPKRYKANYCSGECEFVFLQKYPHTHLVHQANPRGSAGPCCTPTKMSPINMLYFNGKEQIIYGKIPAMVVDRCGCS

SEQ ID NO: 138 - protein, 352 aa, Macaca fascicularis
NENSEQKENVEKEGLCNACTWRQNTKSSRIEAIKIQILSKLRLETAPNISKDAIRQLLPKAPPLRELIDQYDVQRADSSDGSLEDDDYHATTETIITMPTESDFLMQVDGKPKCCFFKFSSKIQYNKVVKAQLWIYLRPVETPTTVFVQILRLIKPMKDGTRYTGIRSLKLDMNPGTGIWQSIDVKTVLQNWLKQPESNLGIEIKALDENGHDLAVTFPGPGEDGLNPFLEVKVTDTPKRSRRDFGLDCDEHSTESRCCRYPLTVDFEAFGWDWIIAPKRYKANYCSGECEFVFLQKYPHTHLVHQANPRGSAGPCCTPTKMSPINMLYFNGKEQIIYGKIPAMVVDRCGCS

SEQ ID NO: 139 - protein, 352 aa, Macaca fascicularis
NENSEQKENVEKEGLCNACTWRQNTKSSRIEAIKIQILSKLRLETAPNISKDAIRQLLPKAPPLRELIDQYDVQRADSSDGSLEDDDYHATTETIITMPTESDFLMQVDGKPKCCFFKFSSKIQYNKVVKAQLWIYLRPVETPTTVFVQILRLIKPMKDGTRYTGIRSLKLDMNPGTGIWQSIDVKTVLQNWLKQPESNLGIEIKALDENGHDLAVTFPGPGEDGLNPFLEVKVTDTPKASRADFGLDCDEHSTESRCCRYPLTVDFEAFGWDWIIAPKRYKANYCSGECEFVFLQKYPHTHLVHQANPRGSAGPCCTPTKMSPINMLYFNGKEQIIYGKIPAMVVDRCGCS

SEQ ID NO: 140 - protein, 243 aa, Macaca fascicularis
NENSEQKENVEKEGLCNACTWRQNTKSSRIEAIKIQILSKLRLETAPNISKDAIRQLLPKAPPLRELIDQYDVQRDDSSDGSLEDDDYHATTETIITMPTESDFLMQVDGKPKCCFFKFSSKIQYNKVVKAQLWIYLRPVETPTTVFVQILRLIKPMKDGTRYTGIRSLKLDMNPGTGIWQSIDVKTVLQNWLKQPESNLGIEIKALDENGHDLAVTFPGPGEDGLNPFLEVKVTDTPKRSRR

SEQ ID NO: 141 - protein, 243 aa, Macaca fascicularis
NENSEQKENVEKEGLCNACTWRQNTKSSRIEAIKIQILSKLRLETAPNISKDAIRQLLPKAPPLRELIDQYDVQRADSSDGSLEDDDYHATTETIITMPTESDFLMQVDGKPKCCFFKFSSKIQYNKVVKAQLWIYLRPVETPTTVFVQILRLIKPMKDGTRYTGIRSLKLDMNPGTGIWQSIDVKTVLQNWLKQPESNLGIEIKALDENGHDLAVTFPGPGEDGLNPFLEVKVTDTPKRSRR

SEQ ID NO: 142 - protein, 381 aa, Mus sp.
AEGPAAAAAAAAAAAGVGGERSSRPAPSAPPEPDGCPVCVWRQHSRELRLESIKSQILSKLRLKEAPNISREVVKQLLPKAPPLQQILDLHDFQGDALQPEDFLEEDEYHATTETVISMAQETDPAVQTDGSPLCCHFHFSPKVMFTKVLKAQLWVYLRPVPRPATVYLQILRLKPLTGEGTAGGGGGGRRHIRIRSLKIELHSRSGHWQSIDFKQVLHSWFRQPQSNWGIEINAFDPSGTDLAVTSLGPGAEGLHPFMELRVLENTKRSRRNLGLDCDEHSSESRCCRYPLTVDFEAFGWDWIIAPKRYKANYCSGQCEYMFMQKYPHTHLVQQANPRGSAGPCCTPTKMSPINMLYFNDKQQIIYGKIPGMVVDRCGCS

SEQ ID NO: 143 - protein, 381 aa, Mus sp.
AEGPAAAAAAAAAAAGVGGERSSRPAPSAPPEPDGCPVCVWRQHSRELRLESIKSQILSKLRLKEAPNISREVVKQLLPKAPPLQQILDLHDFQGDALQPEDFLEEDEYHATTETVISMAQETDPAVQTDGSPLCCHFHFSPKVMFTKVLKAQLWVYLRPVPRPATVYLQILRLKPLTGEGTAGGGGGGRRHIRIRSLKIELHSRSGHWQSIDFKQVLHSWFRQPQSNWGIEINAFDPSGTDLAVTSLGPGAEGLHPFMELRVLENTKASRANLGLDCDEHSSESRCCRYPLTVDFEAFGWDWIIAPKRYKANYCSGQCEYMFMQKYPHTHLVQQANPRGSAGPCCTPTKMSPINMLYFNDKQQIIYGKIPGMVVDRCGCS

SEQ ID NO: 144 - protein, 381 aa, Mus sp.
AEGPAAAAAAAAAAAGVGGERSSRPAPSAPPEPDGCPVCVWRQHSRELRLESIKSQILSKLRLKEAPNISREVVKQLLPKAPPLQQILDLHDFQGAALQPEDFLEEDEYHATTETVISMAQETDPAVQTDGSPLCCHFHFSPKVMFTKVLKAQLWVYLRPVPRPATVYLQILRLKPLTGEGTAGGGGGGRRHIRIRSLKIELHSRSGHWQSIDFKQVLHSWFRQPQSNWGIEINAFDPSGTDLAVTSLGPGAEGLHPFMELRVLENTKASRANLGLDCDEHSSESRCCRYPLTVDFEAFGWDWIIAPKRYKANYCSGQCEYMFMQKYPHTHLVQQANPRGSAGPCCTPTKMSPINMLYFNDKQQIIYGKIPGMVVDRCGCS

SEQ ID NO: 145 - protein, 381 aa, Mus sp.; identical to SEQ ID NO: 142

SEQ ID NO: 146 - protein, 272 aa, Mus sp.
AEGPAAAAAAAAAAAGVGGERSSRPAPSAPPEPDGCPVCVWRQHSRELRLESIKSQILSKLRLKEAPNISREVVKQLLPKAPPLQQILDLHDFQGDALQPEDFLEEDEYHATTETVISMAQETDPAVQTDGSPLCCHFHFSPKVMFTKVLKAQLWVYLRPVPRPATVYLQILRLKPLTGEGTAGGGGGGRRHIRIRSLKIELHSRSGHWQSIDFKQVLHSWFRQPQSNWGIEINAFDPSGTDLAVTSLGPGAEGLHPFMELRVLENTKRSRR

SEQ ID NO: 147 - protein, 272 aa, Mus sp.
AEGPAAAAAAAAAAAGVGGERSSRPAPSAPPEPDGCPVCVWRQHSRELRLESIKSQILSKLRLKEAPNISREVVKQLLPKAPPLQQILDLHDFQGAALQPEDFLEEDEYHATTETVISMAQETDPAVQTDGSPLCCHFHFSPKVMFTKVLKAQLWVYLRPVPRPATVYLQILRLKPLTGEGTAGGGGGGRRHIRIRSLKIELHSRSGHWQSIDFKQVLHSWFRQPQSNWGIEINAFDPSGTDLAVTSLGPGAEGLHPFMELRVLENTKRSRR

SEQ ID NO: 148 - protein, 1260 aa, Macaca fascicularis
GPAGERGAGGGGALARERFKVVFAPVICKRTCLKGQCRDSCQQGSNMTLIGENGHSTDTLTGSGFRVVVCPLPCMNGGQCSSRNQCLCPPDFTGRFCQVPAGGAGGGTGGSGPGLSRAGALSTGALPPLAPEGDSVASKHAIYAVQVIADPPGPGEGPPAQHAAFLVPLGPGQISAEVQAPPPVVNVRVHHPPEASVQVHRIESSNAEGAAPSQHLLPHPKPSHPRPPTQKPLGRCFQDTLPKQPCGSNPLPGLTKQEDCCGSIGTAWGQSKCHKCPQLQYTGVQKPGPVRGEVGADCPQGYKRLNSTHCQDINECAMPGVCRHGDCLNNPGSYRCVCPPGHSLGPSRTQCIADKPEEKSLCFRLVSPEHQCQHPLTTRLTRQLCCCSVGKAWGARCQRCPADGTAAFKEICPAGKGYHILTSHQTLTIQGESDFSLFLHPDGPPKPQQLPESPSQAPPPEDTEEERGVTTDSPVSEERSVQQSHPTATTSPARPYPELISRPSPPTMRWFLPDLPPSRSAVEIAPTQVTETDECRLNQNICGHGECVPGPPDYSCHCNPGYRSHPQHRYCVDVNECEAEPCGPGRGICMNTGGSYNCHCNRGYRLHVGAGGRSCVDLNECAKPHLCGDGGFCINFPGHYKCNCYPGYRLKASRPPVCEDIDECRDPSSCPDGKCENKPGSFKCIACQPGYRSQGGGACRDVNECAEGSPCSPGWCENLPGSFRCTCAQGYAPAPDGRSCVDVDECEAGDVCDNGICTNTPGSFQCQCLSGYHLSRDRSHCEDIDECDFPAACIGGDCINTNGSYRCLCPQGHRLVGGRKCQDIDECTQDPGLCLPHGACKNLQGSYVCVCDEGFTPTQDQHGCEEVEQPHHKKECYLNFDDTVFCDSVLATNVTQQECCCSLGAGWGDHCEIYPCPVYSSAEFHSLCPDGKGYTQDNNIVNYGIPAHRDIDECMLFGAEICKEGKCVNTQPGYECYCKQGFYYDGNLLECVDVDECLDESNCRNGVCENTRGGYRCACTPPAEYSPAQRQCLSPEEMDVDECQDPAACRPGRCVNLPGSYRCECRPPWVPGPSGRDCQLPESPAERAPERRDVCWSQRGEDGMCAGPQAGPALTFDDCCCRQGRGWGAQCRPCPPRGAGSQCPTSQSESNSFWDTSPLLLGKPRRDEDSSEEDSDECRCVSGRCVPRPGGAVCECPGGFQLDASRARCVDIDECRELNQRGLLCKSERCVNTSGSFRCVCKAGFARSRPHGACVPQRRR

SEQ ID NO: 149 - protein, 1228 aa, Mus sp.
GPAGERGTGGGGALARERFKVVFAPVICKRTCLKGQCRDSCQQGSNMTLIGENGHSTDTLTGSAFRVVVCPLPCMNGGQCSSRNQCLCPPDFTGRFCQVPAAGTGAGTGSSGPGLARTGAMSTGPLPPLAPEGESVASKHAIYAVQVIADPPGPGEGPPAQHAAFLVPLGPGQISAEVQAPPPVVNVRVHHPPEASVQVHRIEGPNAEGPASSQHLLPHPKPPHPRPPTQKPLGRCFQDTLPKQPCGSNPLPGLTKQEDCCGSIGTAWGQSKCHKCPQLQYTGVQKPVPVRGEVGADCPQGYKRLNSTHCQDINECAMPGNVCHGDCLNNPGSYRCVCPPGHSLGPLAAQCIADKPEEKSLCFRLVSTEHQCQHPLTTRLTRQLCCCSVGKAWGARCQRCPADGTAAFKEICPGKGYHILTSHQTLTIQGESDFSLFLHPDGPPKPQQLPESPSRAPPLEDTEEERGVTMDPPVSEERSVQQSHPTTTTSPPRPYPELISRPSPPTFHRFLPDLPPSRSAVEIAPTQVTETDECRLNQNICGHGQCVPGPSDYSCHCNAGYRSHPQHRYCVDVNECEAEPCGPGKGICMNTGGSYNCHCNRGYRLHVGAGGRSCVDLNECAKPHLCGDGGFCINFPGHYKCNCYPGYRLKASRPPICEDIDECRDPSTCPDGKCENKPGSFKCIACQPGYRSQGGGACRDVNECSEGTPCSPGWCENLPGSYRCTCAQYEPAQDGLSCIDVDECEAGKVCQDGICTNTPGSFQCQCLSGYHLSRDRSRCEDIDECDFPAACIGGDCINTNGSYRCLCPLGHRLVGGRKCKKDIDECSQDPGLCLPHACENLQGSYVCVCDEGFTLTQDQHGCEEVEQPHHKKECYLNFDDTVFCDSVLATNVTQQECCCSLGAGWGDHCEIYPCPVYSSAEFHSLVPDGKRLHSGQQHCELCIPAHRDIDECILFGAEICKEGKCVNTQPGYECYCKQGFYYDGNLLECVDVDECLDESNCRNGVCENTRGGYRCACTPPAEYSPAQAQCLIPERWSTPQRDVKCAGASEERTACVWGPWAGPALTFDDCCCRQPRLGTQCRPCPPRGTGSQCPTSQSESNSFWDTSPLLLGKSPRDEDSSEEDSDECRCVSGRCVPRPGGAVCECPGGFQLDASRARCVDIDECRELNQRGLLCKSERCVNTSGSFRCVCKAGFTRSRPHGPACLSAAADDAAIAHTSVIDHRGYFH

SEQ ID NO: 150 - protein, 1373 aa, Macaca fascicularis
NHTGRIKVVFTPSICKVTCTKGSCQNSCEKGNTTTLISENGHAADTLTATNFRVVLCHLPCMNGGQCSSRDKCQCPPNFTGKLCQIPVHGASVPKLYQHSQQPGKALGTHVIHSTHTLPLTVTSQQGVKVKFPPNIVNIHVKHPPEASVQIHQVSRIDGPTGQKTKEAQPGQSQVSYQGLPVQKTQTIHSTYSHQQVIPHVYPVAAKTQLGRCFQETIGSQCGKALPGLSKQEDCCGTVGTSWGFNKCQKCPKKPSYHGYNQMMECLPGYKRVNNTFCQDINECQLQGVCPNGECLNTMGSYRCTCKIGFGPDPTFSSCVPDPPVISEEKGPCYRLVSSGRQCMHPLSVHLTKQLCCCSVGKAWGPHCEKCPLPGTAAFKEICPGGMGYTVSGVHRRRPIHHHVGKGPVFVKPKNTQPVAKSTHPPPLPAKEEPVEALTFSREHGPGVAEPEVATAPPEKEIPSLDQEKTKLEPGQPQLSPGISTIHLHPQFPVVIEKTSPPVPVEVAPEASTSSASQVIAPTQVTEINECTVNPDICGAGHCINLPVRYTCICYEGYKFSEQQRKCVDIDECTQVQHLCSQGRCENTEGSFLCICPAGFMASEEGTNCIDVDECLRPDVCGEGHCVNTVGAFRCEYCDSGYRMTQRGRCEDIDECLNPSTCPDEQCVNSPGSYQCVPCTEGFRGWNGQCLDVDECLEPNVCTNGDCSNLEGSYMCSCHKGYTRTPDHKHCKDIDECQQGNLCVNGQCKNTEGSFRCTCGQGYQLSAAKDQCEDIDECQHHHLCAHGQCRNTEGSFQCVCDQGYRASGLGDHCEDINECLEDKSVCQRGDCINTAGSYDCTCPDGFQLDDNKTCQDINECEHPGLCGPQGECLNTEGSFHCVCQQGFSISADGRTCEDIDECVNNTVCDSHGFCDNTAGSFRCLCYQGFQAPQDGQGCVDVNECELLSGVCGEAFCENVEGSFLCVCADENQEYSPMTGQCRSRTSTDLDVEQPKEEKKECYYNLNDASLCDNVLAPNVTKQECCCTSGAGWGDNCEIFPCPVLGTAEFTEMCPKGKGFVPAGESSSEAGGENYKDADECLLFGQEICKNGFCLNTRPGYECYCKQGTYYDPVKLQCFDMDECQDPSSCIDGQCVNTEGSYNCFCTHPMVLDASEKRCIRPAESNEQIEETDVYQDLCWEHLSDEYVCSRPLVGKQTTYTECCCLYGEAWGMQCALCPMKDSDDYAQLCNIPVTGRRQPYGRDALVDFSEQYAPEADPYFIQDRFLNSFEELQAEECGILNGCENGRCVRVQEGYTCDCFDGYHLDTAKMTCVDVNECDELNNRMSLCKNAKCINTEGSYKCLCLPGYVPSDKPNYCTPLNTALNLEKDSDLE

SEQ ID NO: 151 - protein, 1374 aa, Mus sp.
NHTGRIKVVFTPSICKVTCTKGNCQNSCQKGNTTTLISENGHAADTLTATNFRVVICHLPCMNGGQCSSRDKCQCPPNFTGKLCQIPVLGASMPKLYQHAQQQGKALGSHVIHSTHTLPLTMTSQQGVKVKFPPNIVNIHVKHPPEASVQIHQVSRIDSPGGQKVKEAQPGQSQVSYQGLPVQKTQTVHSTYSHQQLIPHVYPVAAKTQLGRCFQETIGSQCGKALPGLSKQEDCCGTVGTSWGFNKCQKCPKKQSYHGYTQMMECLQGYKRVNNTFCQDINECQLQGVCPNGECLNTMGSYRCSCKMGFGPDPTFSSCVPDPPVISEEKGPCYRLVSPGRHCMHPLSVHLTKQICCCSVGKAWGPHCEKCPLPGTAAFKEICPGGMGYTVSGVHRRRPIHQHIGKEAVYVKPKNTQPVAKSTHPPPLPAKEEPVEALTSSWEHGPRGAEPEVVTAPPEKEIPSLDQEKTRLEPGQPQLSPGVSTIHLHPQFPVVVEKTSPPVPVEVAPEASTSSASQVIAPTQVTEINECTVNPDICGAGHCINLPVRYTCICYEGYKFSEQLRKCVDIDECAQVRHLCSQGRCENTEGSFLCVCPAGFMASEEGTNCIDVDECLRPDMCRDGRCINTAGAFRCEYCDSGYRMSRRGYCEDIDECLKPSTCPEEQCVNTPGSYQCVPCTEGFRGWNGQCLDVDECLQPKVCTNGSCTNLEGSYMCSCHRGYSPTPDHRHCQDIDECQQGNLCMNGQCRNTDGSFRCTCGQGYQLSAAKDQCEDIDECEHHHLCSHGQCRNTEGSFQCVCNQGYRASVLGDHCEDINECLEDSSVCQGGDCINTAGSYDCTCPDGFQLNDNKGCQDINECAQPGLCGSHGECLNTQGSFHCVCEQGFSISADGRTCEDIDECVNNTVCDSHGFCDNTAGSFRCLCYQGFQAPQDGQGCVDVNECELLSGVCGEAFCENVEGSFLCVCADENQEYSPMTGQCRSRVTEDSGVDRQPREEKKECYYNLNDASLCDNVLAPNVTKQECCCTSGAGWGDNCEIFPCPVQGTAEFTEMCPRGKGLVPAGESSYDTGGENYKDADECLLFGEEICKNGYCLNTQPGYECYCKQGTYYDPVKLQCFDMDECQDPNSCIDGQCVNTEGSYNCFCTHPMVLDASEKRCVQPTESNEQIEETDVYQDLCWEHLSEEYVCSRPLVGKQTTYTECCCLYGEAWGMQCALCPMKDSDDYAQLCNIPVTGRRRPYGRDALVDFSEQYGPETDPYFIQDRFLNSFEELQAEECGILNGCENGRCVRVQEGYTCDCFDGYHLDMAKMTCVDVNECSELNNRMSLCKNAKCINTEGSYKCLCLPGYIPSDKPNYCTPLNSALNLDKESDLE

SEQ ID NO: 152 - protein, 646 aa, Mus sp.
ISQRREQVPCRTVNKEALCHGLGLLQVPSVLSLDIQALYLSGNQLQSILVSPLGFYTALRHLDLSDNQISFLQAGVFQALPYLEHLNLAHNRLATGMALNSGGLGRLPLLVSLDLSGNSLHGNLVERLLGETPRLRTLSLAENSLTRLARHTFWGMPAVEQLDLHSNVLMDIEDGAFEALPHLTHLNLSRNSLTCISDFSLQQLQVLDLSCNSIEAFQTAPEPQAQFQLAWLDLRENKLLHFPDLAVFPRLIYLNVSNNLIQLPAGLPRGSEDLHAPSEGWSASPLSNPSRNASTHPLSQLLNLDLSYNEIELVPASFLEHLTSLRFLNLSRNCLRSFEARQVDSLPCLVLLDLSHNVLEALELGTKVLGSLQTLLLQDNALQELPPYTFASLASLQRLNLQGNQVSPCGGPAEPGPPGCVDFSGIPTLHVLNMAGNSMGMLRAGSFLHTPLTELDLSTNPGLDVATGALVGLEASLEVLELQGNGLTVLRVDLPCFLRLKRLNLAENQLSHLPAWTRAVSLEVLDLRNNSFSLLPGNAMGGLETSLRRLYLQGNPLSCCGNGWLAAQLHQGRVDVDATQDLICRFGSQEELSLSLVRPEDCEKGGLKNVNLILLLSFTLVSAIVLTTLATICFLRRQKLSQQYKA

SEQ ID NO: 153 - protein, 611 aa, Mus sp.
ISQRREQVPCRTVNKEALCHGLGLLQVPSVLSLDIQALYLSGNQLQSILVSPLGFYTALRHLDLSDNQISFLQAGVFQALPYLEHLNLAHNRLATGMALNSGGLGRLPLLVSLDLSGNSLHGNLVERLLGETPRLRTLSLAENSLTRLARHTFWGMPAVEQLDLHSNVLMDIEDGAFEALPHLTHLNLSRNSLTCISDFSLQQLQVLDLSCNSIEAFQTAPEPQAQFQLAWLDLRENKLLHFPDLAVFPRLIYLNVSNNLIQLPAGLPRGSEDLHAPSEGWSASPLSNPSRNASTHPLSQLLNLDLSYNEIELVPASFLEHLTSLRFLNLSRNCLRSFEARQVDSLPCLVLLDLSHNVLEALELGTKVLGSLQTLLLQDNALQELPPYTFASLASLQRLNLQGNQVSPCGGPAEPGPPGCVDFSGIPTLHVLNMAGNSMGMLRAGSFLHTPLTELDLSTNPGLDVATGALVGLEASLEVLELQGNGLTVLRVDLPCFLRLKRLNLAENQLSHLPAWTRAVSLEVLDLRNNSFSLLPGNAMGGLETSLRRLYLQGNPLSCCGNGWLAAQLHQGRVDVDATQDLICRFGSQEELSLSLVRPEDCEKGGLKNVN

SEQ ID NO: 154 - protein, 675 aa, Mus sp.
WRSGPGTATAASQGGCKVVDGVADCRGLNLASVPSSLPPHSRMLILDANPLKDLWNHSLQAYPRLENLSLHSCHLDRISHYAFREQGHLRNLVLADNRLSENYKESAAALHTLLGLRRLDLSGNSLTEDMAALMLQNLSSLEVVSLARNTLMRLDDSIFEGLEHLVELDLQRNYIFEIEGGAFDGLTELRRLNLAYNNLPCIVDFSLTQLRFLNVSYNILEWFLAAREEVAFELEILDLSHNQLLFFPLLPQCGKLHTLLLQDNNMGFYRELYNTSSPQEMVAQFLLVDGNVTNITTVNLWEEFSSSDLSALRFLDMSQNQFRHLPDGFLKKTPSLSHLNLNQNCLKMLHIREHEPPGALTELDLSHNQLAELHLAPGLTGSLRNLRVFNLSSNQLLGVPTGLFDNASSITTIDMSHNQISLCPQMVPVDWEGPPSCVDFRNMGSLRSLSLDGCGLKALQDCPFQGTSLTHLDLSSNWGVLNGSISPLWAVAPTLQVLSLRDVGLGSGAAEMDFSAFGNLRALDLSGNSLTSFPKFKGSLALRTLDLRRNSLTALPQRVVSEQPLRGLQTIYLSQNPYDCCGVEGWGALQQHFKTVADLSMVTCNLSSKIVRVVELPEGLPQGCKWEQVDTGLFYLVLILPSCLTLLVACTVVFLTFKKPLLQVIKSRCHWSSIY

SEQ ID NO: 155 - protein, 633 aa, Mus sp.
WRSGPGTATAASQGGCKVVDGVADCRGLNLASVPSSLPPHSRMLILDANPLKDLWNHSLQAYPRLENLSLHSCHLDRISHYAFREQGHLRNLVLADNRLSENYKESAAALHTLLGLRRLDLSGNSLTEDMAALMLQNLSSLEVVSLARNTLMRLDDSIFEGLEHLVELDLQRNYIFEIEGGAFDGLTELRRLNLAYNNLPCIVDFSLTQLRFLNVSYNILEWFLAAREEVAFELEILDLSHNQLLFFPLLPQCGKLHTLLLQDNNMGFYRELYNTSSPQEMVAQFLLVDGNVTNITTVNLWEEFSSSDLSALRFLDMSQNQFRHLPDGFLKKTPSLSHLNLNQNCLKMLHIREHEPPGALTELDLSHNQLAELHLAPGLTGSLRNLRVFNLSSNQLLGVPTGLFDNASSITTIDMSHNQISLCPQMVPVDWEGPPSCVDFRNMGSLRSLSLDGCGLKALQDCPFQGTSLTHLDLSSNWGVLNGSISPLWAVAPTLQVLSLRDVGLGSGAAEMDFSAFGNLRALDLSGNSLTSFPKFKGSLALRTLDLRRNSLTALPQRVVSEQPLRGLQTIYLSQNPYDCCGVEGWGALQQHFKTVADLSMVTCNLSSKIVRVVELPEGLPQGCKWEQVDTGL

SEQ ID NO: 156 - protein, 674 aa, Macaca fascicularis
WRDRSVTATAASQRGCKLVGGDTDCRGQSLASVPSSLPPHARTLILDANPLKALWNHSLQPYPLLESLSLHSCHLERIGRGAFQEQGHLRSLVLGDNCLSENYKETAAALHTLPGLQTLDLSGNSLTEDMAALMLQNLSSLQSVSLARNTIMRLDDSVFEGLERLRELDLQRNYIFEIEGGAFDGLTELRHLNLAYNNLPCIVDFGLTQLRSLNVSYNVLEWFLAAGGEAAFELETLDLSHNQLLFFPLLPQYSKLHTLLLRDNNMGFYRDLYNTSSPREMVAQFLLVDGNVTNITTVNLWEEFSSSDLADLRFLDMSQNQFQYLPDGFLRKMPSLSHLNLNQNCLMTLHIREHEPPGALTELDLSHNQLSELHLTPGLASCLGSLRLFNLSSNQLLGVPPGLFANARNITTLDMSHNQISLCPLPAASDRVGPPSCVDFRNMASLRSLSLEGCGLGALPDCPFQGTSLTSLDLSSNWGVLNGSLAPLRDVAPMLQVLSLRNMGLHSNFMALDFSGFGNLRDLDLSGNCLTTFPRFGGSLALETLDLRRNSLTALPQKAVSEQLSRGLRTIYLSQNPYDCCGVDGWGALQQGQTVADWATVTCNLSSKIIRLAELPGGVPRDCKWERLDLGLLYLVLILPSCLTLLVACTLIVLTFKKPLLQVIKSRCHWSSVY

SEQ ID NO: 157 - protein, 632 aa, Macaca fascicularis
WRDRSVTATAASQRGCKLVGGDTDCRGQSLASVPSSLPPHARTLILDANPLKALWNHSLQPYPLLESLSLHSCHLERIGRGAFQEQGHLRSLVLGDNCLSENYKETAAALHTLPGLQTLDLSGNSLTEDMAALMLQNLSSLQSVSLARNTIMRLDDSVFEGLERLRELDLQRNYIFEIEGGAFDGLTELRHLNLAYNNLPCIVDFGLTQLRSLNVSYNVLEWFLAAGGEAAFELETLDLSHNQLLFFPLLPQYSKLHTLLLRDNNMGFYRDLYNTSSPREMVAQFLLVDGNVTNITTVNLWEEFSSSDLADLRFLDMSQNQFQYLPDGFLRKMPSLSHLNLNQNCLMTLHIREHEPPGALTELDLSHNQLSELHLTPGLASCLGSLRLFNLSSNQLLGVPPGLFANARNITTLDMSHNQISLCPLPAASDRVGPPSCVDFRNMASLRSLSLEGCGLGALPDCPFQGTSLTSLDLSSNWGVLNGSLAPLRDVAPMLQVLSLRNMGLHSNFMALDFSGFGNLRDLDLSGNCLTTFPRFGGSLALETLDLRRNSLTALPQKAVSEQLSRGLRTIYLSQNPYDCCGVDGWGALQQGQTVADWATVTCNLSSKIIRLAELPGGVPRDCKWERLDLGL

SEQ ID NO: 158 - protein, 179 aa, Homo sapiens
NECELLSGVCGEAFCENVEGSFLCVCADENQEYSPMTGQCRSRTSTDLDVDVDQPKEEKKECYYNLNDASLCDNVLAPNVTKQECCCTSGVGWGDNCEIFPCPVLGTAEFTEMCPKGKGFVPAGESSSEAGGENYKDADECLLFGQEICKNGFCLNTRPGYECYCKQGTYYDPVKLQCF

SEQ ID NO: 159 - protein, 434 aa, Homo sapiens
NECELLSGVCGEAFCENVEGSFLCVCADENQEYSPMTGQCRSRTSTDLDVDVDQPKEEKKECYYNLNDASLCDNVLAPNVTKQECCCTSGVGWGDNCEIFPCPVLGTAEFTEMCPKGKGFVPAGESSSEAGGENYKDADECLLFGQEICKNGFCLNTRPGYECYCKQGTYYDPVKLQCFDMDECQDPSSCIDGQCVNTEGSYNCFCTHPMVLDASEKRCIRPAESNEQIEETDVYQDLCWEHLSDEYVCSRPLVGKQTTYTECCCLYGEAWGMQCALCPLKDSDDYAQLCNIPVTGRRQPYGRDALVDFSEQYTPEADPYFIQDRFLNSFEELQAEECGILNGCENGRCVRVQEGYTCDCFDGYHLDTAKMTCVDVNECDELNNRMSLCKNAKCINTDGSYKCLCLPGYVPSDKPNYCTPLNTALNLEKDSDLE

SEQ ID NO: 160 - protein, 913 aa, Homo sapiens
PSLDQEKTKLEPGQPQLSPGISTIHLHPQFPVVIEKTSPPVPVEVAPEASTSSASQVIAPTQVTEINECTVNPDICGAGHCINLPVRYTCICYEGYRFSEQQRKCVDIDECTQVQHLCSQGRCENTEGSFLCICPAGFMASEEGTNCIDVDECLRPDVCGEGHCVNTVGAFRCEYCDSGYRMTQRGRCEDIDECLNPSTCPDEQCVNSPGSYQCVPCTEGFRGWNGQCLDVDECLEPNVCANGDCSNLEGSYMCSCHKGYTRTPDHKHCRDIDECQQGNLCVNGQCKNTEGSFRCTCGQGYQLSAAKDQCEDIDECQHRHLCAHGQCRNTEGSFQCVCDQGYRASGLGDHCEDINECLEDKSVCQRGDCINTAGSYDCTCPDGFQLDDNKTCQDINECEHPGLCGPQGECLNTEGSFHCVCQQGFSISADGRTCEDIDECVNNTVCDSHGFCDNTAGSFRCLCYQGFQAPQDGQGCVDVNECELLSGVCGEAFCENVEGSFLCVCADENQEYSPMTGQCRSRTSTDLDVDVDQPKEEKKECYYNLNDASLCDNVLAPNVTKQECCCTSGVGWGDNCEIFPCPVLGTAEFTEMCPKGKGFVPAGESSSEAGGENYKDADECLLFGQEICKNGFCLNTRPGYECYCKQGTYYDPVKLQCFDMDECQDPSSCIDGQCVNTEGSYNCFCTHPMVLDASEKRCIRPAESNEQIEETDVYQDLCWEHLSDEYVCSRPLVGKQTTYTECCCLYGEAWGMQCALCPLKDSDDYAQLCNIPVTGRRQPYGRDALVDFSEQYTPEADPYFIQDRFLNSFEELQAEECGILNGCENGRCVRVQEGYTCDCFDGYHLDTAKMTCVDVNECDELNNRMSLCKNAKCINTDGSYKCLCLPGYVPSDKPNYCTPLNTALNLEKDSDLE

SEQ ID NO: 161 - protein, 1375 aa, Homo sapiens
NHTGRIKVVFTPSICKVTCTKGSCQNSCEKGNTTTLISENGHAADTLTATNFRVVICHLPCMNGGQCSSRDKCQCPPNFTGKLCQIPVHGASVPKLYQHSQQPGKALGTHVIHSTHTLPLTVTSQQGVKVKFPPNIVNIHVKHPPEASVQIHQVSRIDGPTGQKTKEAQPGQSQVSYQGLPVQKTQTIHSTYSHQQVIPHVYPVAAKTQLGRCFQETIGSQCGKALPGLSKQEDCCGTVGTSWGFNKCQKCPKKPSYHGYNQMMECLPGYKRVNNTFCQDINECQLQGVCPNGECLNTMGSYRCTCKIGFGPDPTFSSCVPDPPVISEEKGPCYRLVSSGRQCMHPLSVHLTKQLCCCSVGKAWGPHCEKCPLPGTAAFKEICPGGMGYTVSGVHRRRPIHHHVGKGPVFVKPKNTQPVAKSTHPPPLPAKEEPVEALTFSREHGPGVAEPEVATAPPEKEIPSLDQEKTKLEPGQPQLSPGISTIHLHPQFPVVIEKTSPPVPVEVAPEASTSSASQVIAPTQVTEINECTVNPDICGAGHCINLPVRYTCICYEGYRFSEQQRKCVDIDECTQVQHLCSQGRCENTEGSFLCICPAGFMASEEGTNCIDVDECLRPDVCGEGHCVNTVGAFRCEYCDSGYRMTQRGRCEDIDECLNPSTCPDEQCVNSPGSYQCVPCTEGFRGWNGQCLDVDECLEPNVCANGDCSNLEGSYMCSCHKGYTRTPDHKHCRDIDECQQGNLCVNGQCKNTEGSFRCTCGQGYQLSAAKDQCEDIDECQHRHLCAHGQCRNTEGSFQCVCDQGYRASGLGDHCEDINECLEDKSVCQRGDCINTAGSYDCTCPDGFQLDDNKTCQDINECEHPGLCGPQGECLNTEGSFHCVCQQGFSISADGRTCEDIDECVNNTVCDSHGFCDNTAGSFRCLCYQGFQAPQDGQGCVDVNECELLSGVCGEAFCENVEGSFLCVCADENQEYSPMTGQCRSRTSTDLDVDVDQPKEEKKECYYNLNDASLCDNVLAPNVTKQECCCTSGVGWGDNCEIFPCPVLGTAEFTEMCPKGKGFVPAGESSSEAGGENYKDADECLLFGQEICKNGFCLNTRPGYECYCKQGTYYDPVKLQCFDMDECQDPSSCIDGQCVNTEGSYNCFCTHPMVLDASEKRCIRPAESNEQIEETDVYQDLCWEHLSDEYVCSRPLVGKQTTYTECCCLYGEAWGMQCALCPLKDSDDYAQLCNIPVTGRRQPYGRDALVDFSEQYTPEADPYFIQDRFLNSFEELQAEECGILNGCENGRCVRVQEGYTCDCFDGYHLDTAKMTCVDVNECDELNNRMSLCKNAKCINTDGSYKCLCLPGYVPSDKPNYCTPLNTALNLEKDSDLE

SEQ ID NO: 162 - protein, 1260 aa, Homo sapiens
GPAGERGAGGGGALARERFKVVFAPVICKRTCLKGQCRDSCQQGSNMTLIGENGHSTDTLTGSGFRVVVCPLPCMNGGQCSSRNQCLCPPDFTGRFCQVPAGGAGGGTGGSGPGLSRTGALSTGALPPLAPEGDSVASKHAIYAVQVIADPPGPGEGPPAQHAAFLVPLGPGQISAEVQAPPPVVNVRVHHPPEASVQVHRIESSNAESAAPSQHLLPHPKPSHPRPPTQKPLGRCFQDTLPKQPCGSNPLPGLTKQEDCCGSIGTAWGQSKCHKCPQLQYTGVQKPGPVRGEVGADCPQGYKRLNSTHCQDINECAMPGVCRHGDCLNNPGSYRCVCPPGHSLGPSRTQCIADKPEEKSLCFRLVSPEHQCQHPLTTRLTRQLCCCSVGKAWGARCQRCPTDGTAAFKEICPAGKGYHILTSHQTLTIQGESDFSLFLHPDGPPKPQQLPESPSQAPPPEDTEEERGVTTDSPVSEERSVQQSHPTATTTPARPYPELISRPSPPTMRWFLPDLPPSRSAVEIAPTQVTETDECRLNQNICGHGECVPGPPDYSCHCNPGYRSHPQHRYCVDVNECEAEPCGPGRGICMNTGGSYNCHCNRGYRLHVGAGGRSCVDLNECAKPHLCGDGGFCINFPGHYKCNCYPGYRLKASRPPVCEDIDECRDPSSCPDGKCENKPGSFKCIACQPGYRSQGGGACRDVNECAEGSPCSPGWCENLPGSFRCTCAQGYAPAPDGRSCLDVDECEAGDVCDNGICSNTPGSFQCQCLSGYHLSRDRSHCEDIDECDFPAACIGGDCINTNGSYRCLCPQGHRLVGGRKCQDIDECSQDPSLCLPHGACKNLQGSYVCVCDEGFTPTQDQHGCEEVEQPHHKKECYLNFDDTVFCDSVLATNVTQQECCCSLGAGWGDHCEIYPCPVYSSAEFHSLCPDGKGYTQDNNIVNYGIPAHRDIDECMLFGSEICKEGKCVNTQPGYECYCKQGFYYDGNLLECVDVDECLDESNCRNGVCENTRGGYRCACTPPAEYSPAQRQCLSPEEMDVDECQDPAACRPGRCVNLPGSYRCECRPPWVPGPSGRDCQLPESPAERAPERRDVCWSQRGEDGMCAGPLAGPALTFDDCCCRQGRGWGAQCRPCPPRGAGSHCPTSQSESNSFWDTSPLLLGKPPRDEDSSEEDSDECRCVSGRCVPRPGGAVCECPGGFQLDASRARCVDIDECRELNQRGLLCKSERCVNTSGSFRCVCKAGFARSRPHGACVPQRRR

SEQ ID NO: 163 - protein, 86 aa, Homo sapiens
DIDECMLFGSEICKEGKCVNTQPGYECYCKQGFYYDGNLLECVDVDECLDESNCRNGVCENTRGGYRCACTPPAEYSPAQRQCLSP

SEQ ID NO: 164 - protein, 43 aa, Homo sapiens
DVDECQDPAACRPGRCVNLPGSYRCECRPPWVPGPSGRDCQLP

SEQ ID NO: 165 - protein, 43 aa, Homo sapiens
DIDECSQDPSLCLPHGACKNLQGSYVCVCDEGFTPTQDQHGCE

SEQ ID NO: 166 - protein, 43 aa, Homo sapiens
DIDECMLFGSEICKEGKCVNTQPGYECYCKQGFYYDGNLLECV

SEQ ID NO: 167 - protein, 57 aa, Homo sapiens
KKECYLNFDDTVFCDSVLATNVTQQECCCSLGAGWGDHCEIYPCPVYSSAEFHSLCP

SEQ ID NO: 168 - protein, 52 aa, Homo sapiens
DVCWSQRGEDGMCAGPLAGPALTFDDCCCRQGRGWGAQCRPCPPRGAGSHCP

SEQ ID NO: 169 - protein, 277 aa, Homo sapiens
KKECYLNFDDTVFCDSVLATNVTQQECCCSLGAGWGDHCEIYPCPVYSSAEFHSLCPDGKGYTQDNNIVNYGIPAHRDIDECMLFGSEICKEGKCVNTQPGYECYCKQGFYYDGNLLECVDVDECLDESNCRNGVCENTRGGYRCACTPPAEYSPAQRQCLSPEEMDVDECQDPAACRPGRCVNLPGSYRCECRPPWVPGPSGRDCQLPESPAERAPERRDVCWSQRGEDGMCAGPLAGPALTFDDCCCRQGRGWGAQCRPCPPRGAGSHCPTSQSE

SEQ ID NO: 170 - protein, 230 aa, Homo sapiens
KKECYLNFDDTVFCDSVLATNVTQQECCCSLGAGWGDHCEIYPCPVYSSAEFHSLCPDGKGYTQDNNIVNYGIPAHRDIDECMLFGSEICKEGKCVNTQPGYECYCKQGFYYDGNLLECVDVDECLDESNCRNGVCENTRGGYRCACTPPAEYSPAQRQCLSPEEMERAPERRDVCWSQRGEDGMCAGPLAGPALTFDDCCCRQGRGWGAQCRPCPPRGAGSHCPTSQSE

SEQ ID NO: 171 - protein, 174 aa, Homo sapiens
DIDECSQDPSLCLPHGACKNLQGSYVCVCDEGFTPTQDQHGCEEVEQPHHKKECYLNFDDTVFCDSVLATNVTQQECCCSLGAGWGDHCEIYPCPVYSSAEFHSLCPDGKGYTQDNNIVNYGIPAHRDIDECMLFGSEICKEGKCVNTQPGYECYCKQGFYYDGNLLECVDVDE

SEQ ID NO: 172 - protein, 175 aa, Homo sapiens
QDIDECSQDPSLCLPHGACKNLQGSYVCVCDEGFTPTQDQHGCEEVEQPHHKKECYLNFDDTVFCDSVLATNVTQQECCCSLGAGWGDHCEIYPCPVYSSAEFHSLCPDGKGYTQDNNIVNYGIPAHRDIDECMLFGSEICKEGKCVNTQPGYECYCKQGFYYDGNLLECVDVDE

SEQ ID NO: 173 - protein, 170 aa, Homo sapiens
DIDECSQDPSLCLPHGACKNLQGSYVCVCDEGFTPTQDQHGCEEVEQPHHKKECYLNFDDTVFCDSVLATNVTQQECCCSLGAGWGDHCEIYPCPVYSSAEFHSLCPDGKGYTQDNNIVNYGIPAHRDIDECMLFGSEICKEGKCVNTQPGYECYCKQGFYYDGNLLECV

SEQ ID NO: 174 - protein, 171 aa, Homo sapiens
QDIDECSQDPSLCLPHGACKNLQGSYVCVCDEGFTPTQDQHGCEEVEQPHHKKECYLNFDDTVFCDSVLATNVTQQECCCSLGAGWGDHCEIYPCPVYSSAEFHSLCPDGKGYTQDNNIVNYGIPAHRDIDECMLFGSEICKEGKCVNTQPGYECYCKQGFYYDGNLLECV

SEQ ID NO: 175 - protein, 177 aa, Homo sapiens
SSGDIDECSQDPSLCLPHGACKNLQGSYVCVCDEGFTPTQDQHGCEEVEQPHHKKECYLNFDDTVFCDSVLATNVTQQECCCSLGAGWGDHCEIYPCPVYSSAEFHSLCPDGKGYTQDNNIVNYGIPAHRDIDECMLFGSEICKEGKCVNTQPGYECYCKQGFYYDGNLLECVDVDE

SEQ ID NO: 176 - protein, 178 aa, Homo sapiens
SSGQDIDECSQDPSLCLPHGACKNLQGSYVCVCDEGFTPTQDQHGCEEVEQPHHKKECYLNFDDTVFCDSVLATNVTQQECCCSLGAGWGDHCEIYPCPVYSSAEFHSLCPDGKGYTQDNNIVNYGIPAHRDIDECMLFGSEICKEGKCVNTQPGYECYCKQGFYYDGNLLECVDVDE

SEQ ID NO: 177 - protein, 173 aa, Homo sapiens
SSGDIDECSQDPSLCLPHGACKNLQGSYVCVCDEGFTPTQDQHGCEEVEQPHHKKECYLNFDDTVFCDSVLATNVTQQECCCSLGAGWGDHCEIYPCPVYSSAEFHSLCPDGKGYTQDNNIVNYGIPAHRDIDECMLFGSEICKEGKCVNTQPGYECYCKQGFYYDGNLLECV

SEQ ID NO: 178 - protein, 174 aa, Homo sapiens
SSGQDIDECSQDPSLCLPHGACKNLQGSYVCVCDEGFTPTQDQHGCEEVEQPHHKKECYLNFDDTVFCDSVLATNVTQQECCCSLGAGWGDHCEIYPCPVYSSAEFHSLCPDGKGYTQDNNIVNYGIPAHRDIDECMLFGSEICKEGKCVNTQPGYECYCKQGFYYDGNLLECV

SEQ ID NO: 179 - protein, 186 aa, Homo sapiens
GQGCVDVNECELLSGVCGEAFCENVEGSFLCVCADENQEYSPMTGQCRSRTSTDLDVDVDQPKEEKKECYYNLNDASLCDNVLAPNVTKQECCCTSGVGWGDNCEIFPCPVLGTAEFTEMCPKGKGFVPAGESSSEAGGENYKDADECLLFGQEICKNGFCLNTRPGYECYCKQGTYYDPVKLQCF

SEQ ID NO: 180 - protein, 441 aa, Homo sapiens
GQGCVDVNECELLSGVCGEAFCENVEGSFLCVCADENQEYSPMTGQCRSRTSTDLDVDVDQPKEEKKECYYNLNDASLCDNVLAPNVTKQECCCTSGVGWGDNCEIFPCPVLGTAEFTEMCPKGKGFVPAGESSSEAGGENYKDADECLLFGQEICKNGFCLNTRPGYECYCKQGTYYDPVKLQCFDMDECQDPSSCIDGQCVNTEGSYNCFCTHPMVLDASEKRCIRPAESNEQIEETDVYQDLCWEHLSDEYVCSRPLVGKQTTYTECCCLYGEAWGMQCALCPLKDSDDYAQLCNIPVTGRRQPYGRDALVDFSEQYTPEADPYFIQDRFLNSFEELQAEECGILNGCENGRCVRVQEGYTCDCFDGYHLDTAKMTCVDVNECDELNNRMSLCKNAKCINTDGSYKCLCLPGYVPSDKPNYCTPLNTALNLEKDSDLE

SEQ ID NO: 181 - protein, 434 aa, Homo sapiens; identical to SEQ ID NO: 159

SEQ ID NO: 182 - protein, 181 aa, Homo sapiens
DVNECELLSGVCGEAFCENVEGSFLCVCADENQEYSPMTGQCRSRTSTDLDVDVDQPKEEKKECYYNLNDASLCDNVLAPNVTKQECCCTSGVGWGDNCEIFPCPVLGTAEFTEMCPKGKGFVPAGESSSEAGGENYKDADECLLFGQEICKNGFCLNTRPGYECYCKQGTYYDPVKLQCF

SEQ ID NO: 183 - protein, 264 aa, Homo sapiens
DIDECVNNTVCDSHGFCDNTAGSFRCLCYQGFQAPQDGQGCVDVNECELLSGVCGEAFCENVEGSFLCVCADENQEYSPMTGQCRSRTSTDLDVDVDQPKEEKKECYYNLNDASLCDNVLAPNVTKQECCCTSGVGWGDNCEIFPCPVLGTAEFTEMCPKGKGFVPAGESSSEAGGENYKDADECLLFGQEICKNGFCLNTRPGYECYCKQGTYYDPVKLQCFDMDECQDPSSCIDGQCVNTEGSYNCFCTHPMVLDASEKRCI

SEQ ID NO: 184 - protein, 553 aa, Homo sapiens
EINECTVNPDICGAGHCINLPVRYTCICYEGYRFSEQQRKCVDIDECTQVQHLCSQGRCENTEGSFLCICPAGFMASEEGTNCIDVDECLRPDVCGEGHCVNTVGAFRCEYCDSGYRMTQRGRCEDIDECLNPSTCPDEQCVNSPGSYQCVPCTEGFRGWNGQCLDVDECLEPNVCANGDCSNLEGSYMCSCHKGYTRTPDHKHCRDIDECQQGNLCVNGQCKNTEGSFRCTCGQGYQLSAAKDQCEDIDECQHRHLCAHGQCRNTEGSFQCVCDQGYRASGLGDHCEDINECLEDKSVCQRGDCINTAGSYDCTCPDGFQLDDNKTCQDINECEHPGLCGPQGECLNTEGSFHCVCQQGFSISADGRTCEDIDECVNNTVCDSHGFCDNTAGSFRCLCYQGFQAPQDGQGCVDVNECELLSGVCGEAFCENVEGSFLCVCADENQEYSPMTGQCRSRTSTDLDVDVDQPKEEKKECYYNLNDASLCDNVLAPNVTKQECCCTSGVGWGDNCEIFPCPVLGTAEFTEMCPKGKGFVPAGESSSEAGGENYKDA

SEQ ID NO: 185 - protein, 635 aa, Homo sapiens
EINECTVNPDICGAGHCINLPVRYTCICYEGYRFSEQQRKCVDIDECTQVQHLCSQGRCENTEGSFLCICPAGFMASEEGTNCIDVDECLRPDVCGEGHCVNTVGAFRCEYCDSGYRMTQRGRCEDIDECLNPSTCPDEQCVNSPGSYQCVPCTEGFRGWNGQCLDVDECLEPNVCANGDCSNLEGSYMCSCHKGYTRTPDHKHCRDIDECQQGNLCVNGQCKNTEGSFRCTCGQGYQLSAAKDQCEDIDECQHRHLCAHGQCRNTEGSFQCVCDQGYRASGLGDHCEDINECLEDKSVCQRGDCINTAGSYDCTCPDGFQLDDNKTCQDINECEHPGLCGPQGECLNTEGSFHCVCQQGFSISADGRTCEDIDECVNNTVCDSHGFCDNTAGSFRCLCYQGFQAPQDGQGCVDVNECELLSGVCGEAFCENVEGSFLCVCADENQEYSPMTGQCRSRTSTDLDVDVDQPKEEKKECYYNLNDASLCDNVLAPNVTKQECCCTSGVGWGDNCEIFPCPVLGTAEFTEMCPKGKGFVPAGESSSEAGGENYKDADECLLFGQEICKNGFCLNTRPGYECYCKQGTYYDPVKLQCFDMDECQDPSSCIDGQCVNTEGSYNCFCTHPMVLDASEKRCI

SEQ ID NO: 186 - protein, 954 aa, Homo sapiens
STHPPPLPAKEEPVEALTFSREHGPGVAEPEVATAPPEKEIPSLDQEKTKLEPGQPQLSPGISTIHLHPQFPVVIEKTSPPVPVEVAPEASTSSASQVIAPTQVTEINECTVNPDICGAGHCINLPVRYTCICYEGYRFSEQQRKCVDIDECTQVQHLCSQGRCENTEGSFLCICPAGFMASEEGTNCIDVDECLRPDVCGEGHCVNTVGAFRCEYCDSGYRMTQRGRCEDIDECLNPSTCPDEQCVNSPGSYQCVPCTEGFRGWNGQCLDVDECLEPNVCANGDCSNLEGSYMCSCHKGYTRTPDHKHCRDIDECQQGNLCVNGQCKNTEGSFRCTCGQGYQLSAAKDQCEDIDECQHRHLCAHGQCRNTEGSFQCVCDQGYRASGLGDHCEDINECLEDKSVCQRGDCINTAGSYDCTCPDGFQLDDNKTCQDINECEHPGLCGPQGECLNTEGSFHCVCQQGFSISADGRTCEDIDECVNNTVCDSHGFCDNTAGSFRCLCYQGFQAPQDGQGCVDVNECELLSGVCGEAFCENVEGSFLCVCADENQEYSPMTGQCRSRTSTDLDVDVDQPKEEKKECYYNLNDASLCDNVLAPNVTKQECCCTSGVGWGDNCEIFPCPVLGTAEFTEMCPKGKGFVPAGESSSEAGGENYKDADECLLFGQEICKNGFCLNTRPGYECYCKQGTYYDPVKLQCFDMDECQDPSSCIDGQCVNTEGSYNCFCTHPMVLDASEKRCIRPAESNEQIEETDVYQDLCWEHLSDEYVCSRPLVGKQTTYTECCCLYGEAWGMQCALCPLKDSDDYAQLCNIPVTGRRQPYGRDALVDFSEQYTPEADPYFIQDRFLNSFEELQAEECGILNGCENGRCVRVQEGYTCDCFDGYHLDTAKMTCVDVNECDELNNRMSLCKNAKCINTDGSYKCLCLPGYVPSDKPNYCTPLNTALNLEKDSDLE

SEQ ID NO: 187 - protein, 645 aa, Homo sapiens
AQHQDKVPCKMVDKKVSCQVLGLLQVPSVLPPDTETLDLSGNQLRSILASPLGFYTALRHLDLSTNEISFLQPGAFQALTHLEHLSLAHNRLAMATALSAGGLGPLPRVTSLDLSGNSLYSGLLERLLGEAPSLHTLSLAENSLTRLTRHTFRDMPALEQLDLHSNVLMDIEDGAFEGLPRLTHLNLSRNSLTCISDFSLQQLRVLDLSCNSIEAFQTASQPQAEFQLTWLDLRENKLLHFPDLAALPRLIYLNLSNNLIRLPTGPPQDSKGIHAPSEGWSALPLSAPSGNASGRPLSQLLNLDLSYNEIELIPDSFLEHLTSLCFLNLSRNCLRTFEARRLGSLPCLMLLDLSHNALETLELGARALGSLRTLLLQGNALRDLPPYTFANLASLQRLNLQGNRVSPCGGPDEPGPSGCVAFSGITSLRSLSLVDNEIELLRAGAFLHTPLTELDLSSNPGLEVATGALGGLEASLEVLALQGNGLMVLQVDLPCFICLKRLNLAENRLSHLPAWTQAVSLEVLDLRNNSFSLLPGSAMGGLETSLRRLYLQGNPLSCCGNGWLAAQLHQGRVDVDATQDLICRFSSQEEVSLSHVRPEDCEKGGLKNINLIIILTFILVSAILLTTLAACCCVRRQKFNQQYKA

SEQ ID NO: 188 - protein, 610 aa, Homo sapiens
AQHQDKVPCKMVDKKVSCQVLGLLQVPSVLPPDTETLDLSGNQLRSILASPLGFYTALRHLDLSTNEISFLQPGAFQALTHLEHLSLAHNRLAMATALSAGGLGPLPRVTSLDLSGNSLYSGLLERLLGEAPSLHTLSLAENSLTRLTRHTFRDMPALEQLDLHSNVLMDIEDGAFEGLPRLTHLNLSRNSLTCISDFSLQQLRVLDLSCNSIEAFQTASQPQAEFQLTWLDLRENKLLHFPDLAALPRLIYLNLSNNLIRLPTGPPQDSKGIHAPSEGWSALPLSAPSGNASGRPLSQLLNLDLSYNEIELIPDSFLEHLTSLCFLNLSRNCLRTFEARRLGSLPCLMLLDLSHNALETLELGARALGSLRTLLLQGNALRDLPPYTFANLASLQRLNLQGNRVSPCGGPDEPGPSGCVAFSGITSLRSLSLVDNEIELLRAGAFLHTPLTELDLSSNPGLEVATGALGGLEASLEVLALQGNGLMVLQVDLPCFICLKRLNLAENRLSHLPAWTQAVSLEVLDLRNNSFSLLPGSAMGGLETSLRRLYLQGNPLSCCGNGWLAAQLHQGRVDVDATQDLICRFSSQEEVSLSHVRPEDCEKGGLKNIN

SEQ ID NO: 189 - protein, 674 aa, Homo sapiens
WRNRSGTATAASQGVCKLVGGAADCRGQSLASVPSSLPPHARMLTLDANPLKTLWNHSLQPYPLLESLSLHSCHLERISRGAFQEQGHLRSLVLGDNCLSENYEETAAALHALPGLRRLDLSGNALTEDMAALMLQNLSSLRSVSLAGNTIMRLDDSVFEGLERLRELDLQRNYIFEIEGGAFDGLAELRHLNLAFNNLPCIVDFGLTRLRVLNVSYNVLEWFLATGGEAAFELETLDLSHNQLLFFPLLPQYSKLRTLLLRDNNMGFYRDLYNTSSPREMVAQFLLVDGNVTNITTVSLWEEFSSSDLADLRFLDMSQNQFQYLPDGFLRKMPSLSHLNLHQNCLMTLHIREHEPPGALTELDLSHNQLSELHLAPGLASCLGSLRLFNLSSNQLLGVPPGLFANARNITTLDMSHNQISLCPLPAASDRVGPPSCVDFRNMASLRSLSLEGCGLGALPDCPFQGTSLTYLDLSSNWGVLNGSLAPLQDVAPMLQVLSLRNMGLHSSFMALDFSGFGNLRDLDLSGNCLTTFPRFGGSLALETLDLRRNSLTALPQKAVSEQLSRGLRTIYLSQNPYDCCGVDGWGALQHGQTVADWAMVTCNLSSKIIRVTELPGGVPRDCKWERLDLGLLYLVLILPSCLTLLVACTVIVLTFKKPLLQVIKSRCHWSSVY

SEQ ID NO: 190 - protein, 632 aa, Homo sapiens
WRNRSGTATAASQGVCKLVGGAADCRGQSLASVPSSLPPHARMLTLDANPLKTLWNHSLQPYPLLESLSLHSCHLERISRGAFQEQGHLRSLVLGDNCLSENYEETAAALHALPGLRRLDLSGNALTEDMAALMLQNLSSLRSVSLAGNTIMRLDDSVFEGLERLRELDLQRNYIFEIEGGAFDGLAELRHLNLAFNNLPCIVDFGLTRLRVLNVSYNVLEWFLATGGEAAFELETLDLSHNQLLFFPLLPQYSKLRTLLLRDNNMGFYRDLYNTSSPREMVAQFLLVDGNVTNITTVSLWEEFSSSDLADLRFLDMSQNQFQYLPDGFLRKMPSLSHLNLHQNCLMTLHIREHEPPGALTELDLSHNQLSELHLAPGLASCLGSLRLFNLSSNQLLGVPPGLFANARNITTLDMSHNQISLCPLPAASDRVGPPSCVDFRNMASLRSLSLEGCGLGALPDCPFQGTSLTYLDLSSNWGVLNGSLAPLQDVAPMLQVLSLRNMGLHSSFMALDFSGFGNLRDLDLSGNCLTTFPRFGGSLALETLDLRRNSLTALPQKAVSEQLSRGLRTIYLSQNPYDCCGVDGWGALQHGQTVADWAMVTCNLSSKIIRVTELPGGVPRDCKWERLDLGL

SEQ ID NO: 191 - protein, 576 aa, Homo sapiens
MWAPRCRRFWSRWEQVAALLLLLLLLGVPPRSLALPPIRYSHAGICPNDMNPNLWVDAQSTCRRECETDQECETYEKCCPNVCGTKSCVAARYMDVKGKKGPVGMPKEATCDHFMCLQQGSECDIWDGQPVCKCKDRCEKEPSFTCASDGLTYYNRCYMDAEACSKGITLAVVTCRYHFTWPNTSPPPPETTMHPTTASPETPELDMAAPALLNNPVHQSVTMGETVSFLCDVVGRPRPEITWEKQLEDRENVVMRPNHVRGNVVVTNIAQLVIYNAQLQDAGIYTCTARNVAGVLRADFPLSVVRGHQAAATSESSPNGTAFPAAECLKPPDSEDCGEEQTRWHFDAQANNCLTFTFGHCHRNLNHFETYEACMLACMSGPLAACSLPALQGPCKAYAPRWAYNSQTGQCQSFVYGGCEGNGNNFESREACEESCPFPRGNQRCRACKPRQKLVTSFCRSDFVILGRVSELTEEPDSGRALVTVDEVLKDEKMGLKFLGQEPLEVTLLHVDWACPCPNVTVSEMPLIIMGEVDGGMAMLRPDSFVGASSARRVRKLREVMHKKTCDVLKEFLGLH

SEQ ID NO: 192 - protein, 274 aa, Homo sapiens
SVVRGHQAAATSESSPNGTAFPAAECLKPPDSEDCGEEQTRWHFDAQANNCLTFTFGHCHRNLNHFETYEACMLACMSGPLAACSLPALQGPCKAYAPRWAYNSQTGQCQSFVYGGCEGNGNNFESREACEESCPFPRGNQRCRACKPRQKLVTSFCRSDFVILGRVSELTEEPDSGRALVTVDEVLKDEKMGLKFLGQEPLEVTLLHVDWACPCPNVTVSEMPLIIMGEVDGGMAMLRPDSFVGASSARRVRKLREVMHKKTCDVLKEFLGLH

SEQ ID NO: 193 - protein, 542 aa, Homo sapiens
LPPIRYSHAGICPNDMNPNLWVDAQSTCRRECETDQECETYEKCCPNVCGTKSCVAARYMDVKGKKGPVGMPKEATCDHFMCLQQGSECDIWDGQPVCKCKDRCEKEPSFTCASDGLTYYNRCYMDAEACSKGITLAVVTCRYHFTWPNTSPPPPETTMHPTTASPETPELDMAAPALLNNPVHQSVTMGETVSFLCDVVGRPRPEITWEKQLEDRENVVMRPNHVRGNVVVTNIAQLVIYNAQLQDAGIYTCTARNVAGVLRADFPLSVVRGHQAAATSESSPNGTAFPAAECLKPPDSEDCGEEQTRWHFDAQANNCLTFTFGHCHRNLNHFETYEACMLACMSGPLAACSLPALQGPCKAYAPRWAYNSQTGQCQSFVYGGCEGNGNNFESREACEESCPFPRGNQRCRACKPRQKLVTSFCRSDFVILGRVSELTEEPDSGRALVTVDEVLKDEKMGLKFLGQEPLEVTLLHVDWACPCPNVTVSEMPLIIMGEVDGGMAMLRPDSFVGASSARRVRKLREVMHKKTCDVLKEFLGLH

SEQ ID NO: 194 - protein, 193 aa, Homo sapiens
AACSLPALQGPCKAYAPRWAYNSQTGQCQSFVYGGCEGNGNNFESREACEESCPFPRGNQRCRACKPRQKLVTSFCRSDFVILGRVSELTEEPDSGRALVTVDEVLKDEKMGLKFLGQEPLEVTLLHVDWACPCPNVTVSEMPLIIMGEVDGGMAMLRPDSFVGASSARRVRKLREVMHKKTCDVLKEFLGLH

SEQ ID NO: 195 - protein, 139 aa, Homo sapiens
FPRGNQRCRACKPRQKLVTSFCRSDFVILGRVSELTEEPDSGRALVTVDEVLKDEKMGLKFLGQEPLEVTLLHVDWACPCPNVTVSEMPLIIMGEVDGGMAMLRPDSFVGASSARRVRKLREVMHKKTCDVLKEFLGLH

SEQ ID NO: 196 - protein, 548 aa, Homo sapiens
MPALRPLLPLLLLLRLTSGAGLLPGLGSHPGVCPNQLSPNLWVDAQSTCERECSRDQDCAAAEKCCINVCGLHSCVAARFPGSPAAPTTAASCEGFVCPQQGSDCDIWDGQPVCRCRDRCEKEPSFTCASDGLTYYNRCYMDAEACLRGLHLHIVPCKHVLSWPPSSPGPPETTARPTPGAAPVPPALYSSPSPQAVQVGGTASLHCDVSGRPPPAVTWEKQSHQRENLIMRPDQMYGNVVVTSIGQLVLYNARPEDAGLYTCTARNAAGLLRADFPLSVVQREPARDAAPSIPAPAECLPDVQACTGPTSPHLVLWHYDPQRGGCMTFPARGCDGAARGFETYEACQQACARGPGDACVLPAVQGPCRGWEPRWAYSPLLQQCHPFVYGGCEGNGNNFHSRESCEDACPVPRTPPCRACRLRSKLALSLCRSDFAIVGRLTEVLEEPEAAGGIARVALEDVLKDDKMGLKFLGTKYLEVTLSGMDWACPCPNMTAGDGPLVIMGEVRDGVAVLDAGSYVRAASEKRVKKILELLEKQACELLNRFQD

SEQ ID NO: 197 - protein, 270 aa, Homo sapiens
SVVQREPARDAAPSIPAPAECLPDVQACTGPTSPHLVLWHYDPQRGGCMTFPARGCDGAARGFETYEACQQACARGPGDACVLPAVQGPCRGWEPRWAYSPLLQQCHPFVYGGCEGNGNNFHSRESCEDACPVPRTPPCRACRLRSKLALSLCRSDFAIVGRLTEVLEEPEAAGGIARVALEDVLKDDKMGLKFLGTKYLEVTLSGMDWACPCPNMTAGDGPLVIMGEVRDGVAVLDAGSYVRAASEKRVKKILELLEKQACELLNRFQD

SEQ ID NO: 198 - protein, 529 aa, Homo sapiens
AGLLPGLGSHPGVCPNQLSPNLWVDAQSTCERECSRDQDCAAAEKCCINVCGLHSCVAARFPGSPAAPTTAASCEGFVCPQQGSDCDIWDGQPVCRCRDRCEKEPSFTCASDGLTYYNRCYMDAEACLRGLHLHIVPCKHVLSWPPSSPGPPETTARPTPGAAPVPPALYSSPSPQAVQVGGTASLHCDVSGRPPPAVTWEKQSHQRENLIMRPDQMYGNVVVTSIGQLVLYNARPEDAGLYTCTARNAAGLLRADFPLSVVQREPARDAAPSIPAPAECLPDVQACTGPTSPHLVLWHYDPQRGGCMTFPARGCDGAARGFETYEACQQACARGPGDACVLPAVQGPCRGWEPRWAYSPLLQQCHPFVYGGCEGNGNNFHSRESCEDACPVPRTPPCRACRLRSKLALSLCRSDFAIVGRLTEVLEEPEAAGGIARVALEDVLKDDKMGLKFLGTKYLEVTLSGMDWACPCPNMTAGDGPLVIMGEVRDGVAVLDAGSYVRAASEKRVKKILELLEKQACELLNRFQD

SEQ ID NO: 199 - protein, 192 aa, Homo sapiens
DACVLPAVQGPCRGWEPRWAYSPLLQQCHPFVYGGCEGNGNNFHSRESCEDACPVPRTPPCRACRLRSKLALSLCRSDFAIVGRLTEVLEEPEAAGGIARVALEDVLKDDKMGLKFLGTKYLEVTLSGMDWACPCPNMTAGDGPLVIMGEVRDGVAVLDAGSYVRAASEKRVKKILELLEKQACELLNRFQD

SEQ ID NO: 200 - protein, 138 aa, Homo sapiens
VPRTPPCRACRLRSKLALSLCRSDFAIVGRLTEVLEEPEAAGGIARVALEDVLKDDKMGLKFLGTKYLEVTLSGMDWACPCPNMTAGDGPLVIMGEVRDGVAVLDAGSYVRAASEKRVKKILELLEKQACELLNRFQD

SEQ ID NO: 201 - protein, 4392 aa, Homo sapiens
MGWRAAGALLLALLLHGRLLAVTHGLRAYDGLSLPEDIETVTASQMRWTHSYLSDDEDMLADSISGDDLGSGDLGSGDFQMVYFRALVNFTRSIEYSPQLEDAGSREFREVSEAVVDTLESEYLKIPGDQVVSVVFIKELDGWVFVELDVGSEGNADGAQIQEMLLRVISSGSVASYVTSPQGFQFRRLGTVPQFPRACTEAEFACHSYNECVALEYRCDRRPDCRDMSDELNCEEPVLGISPTFSLLVETTSLPPRPETTIMRQPPVTHAPQPLLPGSVRPLPCGPQEAACRNGHCIPRDYLCDGQEDCEDGSDELDCGPPPPCEPNEFPCGNGHCALKLWRCDGDFDCEDRTDEANCPTKRPEEVCGPTQFRCVSTNMCIPASFHCDEESDCPDRSDEFGCMPPQVVTPPRESIQASRGQTVTFTCVAIGVPTPIINWRLNWGHIPSHPRVTVTSEGGRGTLIIRDVKESDQGAYTCEAMNARGMVFGIPDGVLELVPQRAGPCPDGHFYLEHSAACLPCFCFGITSVCQSTRRFRDQIRLRFDQPDDFKGVNVTMPAQPGTPPLSSTQLQIDPSLHEFQLVDLSRRFLVHDSFWALPEQFLGNKVDSYGGSLRYNVRYELARGMLEPVQRPDVVLMGAGYRLLSRGHTPTQPGALNQRQVQFSEEHWVHESGRPVQRAELLQVLQSLEAVLIQTVYNTKMASVGLSDIAMDTTVTHATSHGRAHSVEECRCPIGYSGLSCESCDAHFTRVPGGPYLGTCSGCNCNGHASSCDPVYGHCLNCQHNTEGPQCNKCKAGFFGDAMKATATSCRPCPCPYIDASRRFSDTCFLDTDGQATCDACAPGYTGRRCESCAPGYEGNPIQPGGKCRPVNQEIVRCDERGSMGTSGEACRCKNNVVGRLCNECADGSFHLSTRNPDGCLKCFCMGVSRHCTSSSWSRAQLHGASEEPGHFSLTNAASTHTTNEGIFSPTPGELGFSSFHRLLSGPYFWSLPSRFLGDKVTSYGGELRFTVTQRSQPGSTPLHGQPLVVLQGNNIILEHHVAQEPSPGQPSTFIVPFREQAWQRPDGQPATREHLLMALAGIDTLLIRASYAQQPAESRVSGISMDVAVPEETGQDPALEVEQCSCPPGYRGPSCQDCDTGYTRTPSGLYLGTCERCSCHGHSEACEPETGACQGCQHHTEGPRCEQCQPGYYGDAQRGTPQDCQLCPCYGDPAAGQAAHTCFLDTDGHPTCDACSPGHSGRHCERCAPGYYGNPSQGQPCQRDSQVPGPIGCNCDPQGSVSSQCDAAGQCQCKAQVEGLTCSHCRPHHFHLSASNPDGCLPCFCMGITQQCASSAYTRHLISTHFAPGDFQGFALVNPQRNSRLTGEFTVEPVPEGAQLSFGNFAQLGHESFYWQLPETYQGDKVAAYGGKLRYTLSYTAGPQGSPLSDPDVQITGNNIMLVASQPALQGPERRSYEIMFREEFWRRPDGQPATREHLLMALADLDELLIRATFSSVPLAASISAVSLEVAQPGPSNRPRALEVEECRCPPGYIGLSCQDCAPGYTRTGSGLYLGHCELCECNGHSDLCHPETGACSQCQHNAAGEFCELCAPGYYGDATAGTPEDCQPCACPLTNPENMFSRTCESLGAGGYRCTACEPGYTGQYCEQCGPGYVGNPSVQGGQCLPETNQAPLVVEVHPARSIVPQGGSHSLRCQVSGSPPHYFYWSREDGRPVPSGTQQRHQGSELHFPSVQPSDAGVYICTCRNLHQSNTSRAELLVTEAPSKPITVTVEEQRSQSVRPGADVTFICTAKSKSPAYTLVWTRLHNGKLPTRAMDFNGILTIRNVQLSDAGTYVCTGSNMFAMDQGTATLHVQASGTLSAPVVSIHPPQLTVQPGQLAEFRCSATGSPTPTLEWTGGPGGQLPAKAQIHGGILRLPAVEPTDQAQYLCRAHSSAGQQVARAVLHVHGGGGPRVQVSPERTQVHAGRTVRLYCRAAGVPSATITWRKEGGSLPPQARSERTDIATLLIPAITTADAGFYLCVATSPAGTAQARIQVVVLSASDASPPPVKIESSSPSVTEGQTLDLNCVVAGSAHAQVTWYRRGGSLPPHTQVHGSRLRLPQVSPADSGEYVCRVENGSGPKEASITVSVLHGTHSGPSYTPVPGSTRPIRIEPSSSHVAEGQTLDLNCVVPGQAHAQVTWHKRGGSLPARHQTHGSLLRLHQVTPADSGEYVCHVVGTSGPLEASVLVTIEASVIPGPIPPVRIESSSSTVAEGQTLDLSCVVAGQAHAQVTWYKRGGSLPARHQVRGSRLYIFQASPADAGQYVCRASNGMEASITVTVTGTQGANLAYPAGSTQPIRIEPSSSQVAEGQTLDLNCVVPGQSHAQVTWHKRGGSLPVRHQTHGSLLRLYQASPADSGEYVCRVLGSSVPLEASVLVTIEPAGSVPALGVTPTVRIESSSSQVAEGQTLDLNCLVAGQAHAQVTWHKRGGSLPARHQVHGSRLRLLQVTPADSGEYVCRVVGSSGTQEASVLVTIQQRLSGSHSQGVAYPVRIESSSASLANGHTLDLNCLVASQAPHTITWYKRGGSLPSRHQIVGSRLRIPQVTPADSGEYVCHVSNGAGSRETSLIVTIQGSGSSHVPSVSPPIRIESSSPTVVEGQTLDLNCVVARQPQAIITWYKRGGSLPSRHQTHGSHLRLHQMSVADSGEYVCRANNNIDALEASIVISVSPSAGSPSAPGSSMPIRIESSSSHVAEGETLDLNCVVPGQAHAQVTWHKRGGSLPSHHQTRGSRLRLHHVSPADSGEYVCRVMGSSGPLEASVLVTIEASGSSAVHVPAPGGAPPIRIEPSSSRVAEGQTLDLKCVVPGQAHAQVTWHKRGGNLPARHQVHGPLLRLNQVSPADSGEYSCQVTGSSGTLEASVLVTIEPSSPGPIPAPGLAQPIYIEASSSHVTEGQTLDLNCVVPGQAHAQVTWYKRGGSLPARHQTHGSQLRLHLVSPADSGEYVCRAASGPGPEQEASFTVTVPPSEGSSYRLRSPVISIDPPSSTVQQGQDASFKCLIHDGAAPISLEWKTRNQELEDNVHISPNGSIITIVGTRPSNHGTYRCVASNAYGVAQSVVNLSVHGPPTVSVLPEGPVWVKVGKAVTLECVSAGEPRSSARWTRISSTPAKLEQRTYGLMDSHAVLQISSAKPSDAGTYVCLAQNALGTAQKQVEVIVDTGAMAPGAPQVQAEEAELTVEAGHTATLRCSATGSPAPTIHWSKLRSPLPWQHRLEGDTLIIPRVAQQDSGQYICNATSPAGHAEATIILHVESPPYATTVPEHASVQAGETVQLQCLAHGTPPLTFQWSRVGSSLPGRATARNELLHFERAAPEDSGRYRCRVTNKVGSAEAFAQLLVQGPPGSLPATSIPAGSTPTVQVTPQLETKSIGASVEFHCAVPSDRGTQLRWFKEGGQLPPGHSVQDGVLRIQNLDQSCQGTYICQAHGPWGKAQASAQLVIQALPSVLINIRTSVQTVVVGHAVEFECLALGDPKPQVTWSKVGGHLRPGIVQSGGVVRIAHVELADAGQYRCTATNAAGTTQSHVLLLVQALPQISMPQEVRVPAGSAAVFPCIASGYPTPDISWSKLDGSLPPDSRLENNMLMLPSVRPQDAGTYVCTATNRQGKVKAFAHLQVPERVVPYFTQTPYSFLPLPTIKDAYRKFEIKITFRPDSADGMLLYNGQKRVPGSPTNLANRQPDFISFGLVGGRPEFRFDAGSGMATIRHPTPLALGHFHTVTLLRSLTQGSLIVGDLAPVNGTSQGKFQGLDLNEELYLGGYPDYGAIPKAGLSSGFIGCVRELRIQGEEIVFHDLNLTAHGISHCPTCRDRPCQNGGQCHDSESSSYVCVCPAGFTGSRCEHSQALHCHPEACGPDATCVNRPDGRGYTCRCHLGRSGLRCEEGVTVTTPSLSGAGSYLALPALTNTHHELRLDVEFKPLAPDGVLLFSGGKSGPVEDFVSLAMVGGHLEFRYELGSGLAVLRSAEPLALGRWHRVSAERLNKDGSLRVNGGRPVLRSSPGKSQGLNLHTLLYLGGVEPSVPLSPATNMSAHFRGCVGEVSVNGKRLDLTYSFLGSQGIGQCYDSSPCERQPCQHGATCMPAGEYEFQCLCRDGFKGDLCEHEENPCQLREPCLHGGTCQGTRCLCLPGFSGPRCQQGSGHGIAESDWHLEGSGGNDAPGQYGAYFHDDGFLAFPGHVFSRSLPEVPETIELEVRTSTASGLLLWQGVEVGEAGQGKDFISLGLQDGHLVFRYQLGSGEARLVSEDPINDGEWHRVTALREGRRGSIQVDGEELVSGRSPGPNVAVNAKGSVYIGGAPDVATLTGGRFSSGITGCVKNLVLHSARPGAPPPQPLDLQHRAQAGANTRPCPS

SEQ ID NO: 202 - protein, 740 aa, Homo sapiens
AFAHLQVPERVVPYFTQTPYSFLPLPTIKDAYRKFEIKITFRPDSADGMLLYNGQKRVPGSPTNLANRQPDFISFGLVGGRPEFRFDAGSGMATIRHPTPLALGHFHTVTLLRSLTQGSLIVGDLAPVNGTSQGKFQGLDLNEELYLGGYPDYGAIPKAGLSSGFIGCVRELRIQGEEIVFHDLNLTAHGISHCPTCRDRPCQNGGQCHDSESSSYVCVCPAGFTGSRCEHSQALHCHPEACGPDATCVNRPDGRGYTCRCHLGRSGLRCEEGVTVTTPSLSGAGSYLALPALTNTHHELRLDVEFKPLAPDGVLLFSGGKSGPVEDFVSLAMVGGHLEFRYELGSGLAVLRSAEPLALGRWHRVSAERLNKDGSLRVNGGRPVLRSSPGKSQGLNLHTLLYLGGVEPSVPLSPATNMSAHFRGCVGEVSVNGKRLDLTYSFLGSQGIGQCYDSSPCERQPCQHGATCMPAGEYEFQCLCRDGFKGDLCEHEENPCQLREPCLHGGTCQGTRCLCLPGFSGPRCQQGSGHGIAESDWHLEGSGGNDAPGQYGAYFHDDGFLAFPGHVFSRSLPEVPETIELEVRTSTASGLLLWQGVEVGEAGQGKDFISLGLQDGHLVFRYQLGSGEARLVSEDPINDGEWHRVTALREGRRGSIQVDGEELVSGRSPGPNVAVNAKGSVYIGGAPDVATLTGGRFSSGITGCVKNLVLHSARPGAPPPQPLDLQHRAQAGANTRPCPS

SEQ ID NO: 203 - protein, 243 aa, Homo sapiens
NENSEQKENVEKEGLCNACTWRQNTKSSRIEAIKIQILSKLRLETAPNISKDVIRQLLPKAPPLRELIDQYDVQRADSSDGSLEDDDYHATTETIITMPTESDFLMQVDGKPKCCFFKFSSKIQYNKVVKAQLWIYLRPVETPTTVFVQILRLIKPMKDGTRYTGIRSLKLDMNPGTGIWQSIDVKTVLQNWLKQPESNLGIEIKALDENGHDLAVTFPGPGEDGLNPFLEVKVTDTPKRSRR

SEQ ID NO: 204 - protein, 352 aa, Homo sapiens
NENSEQKENVEKEGLCNACTWRQNTKSSRIEAIKIQILSKLRLETAPNISKDVIRQLLPKAPPLRELIDQYDVQRDDSSDGSLEDDDYHATTETIITMPTESDFLMQVDGKPKCCFFKFSSKIQYNKVVKAQLWIYLRPVETPTTVFVQILRLIKPMKDGTRYTGIRSLKLDMNPGTGIWQSIDVKTVLQNWLKQPESNLGIEIKALDENGHDLAVTFPGPGEDGLNPFLEVKVTDTPKASRADFGLDCDEHSTESRCCRYPLTVDFEAFGWDWIIAPKRYKANYCSGECEFVFLQKYPHTHLVHQANPRGSAGPCCTPTKMSPINMLYFNGKEQIIYGKIPAMVVDRCGCS

SEQ ID NO: 205 - protein, 352 aa, Homo sapiens
NENSEQKENVEKEGLCNACTWRQNTKSSRIEAIKIQILSKLRLETAPNISKDVIRQLLPKAPPLRELIDQYDVQRADSSDGSLEDDDYHATTETIITMPTESDFLMQVDGKPKCCFFKFSSKIQYNKVVKAQLWIYLRPVETPTTVFVQILRLIKPMKDGTRYTGIRSLKLDMNPGTGIWQSIDVKTVLQNWLKQPESNLGIEIKALDENGHDLAVTFPGPGEDGLNPFLEVKVTDTPKRSRRDFGLDCDEHSTESRCCRYPLTVDFEAFGWDWIIAPKRYKANYCSGECEFVFLQKYPHTHLVHQANPRGSAGPCCTPTKMSPINMLYFNGKEQIIYGKIPAMVVDRCGCS

SEQ ID NO: 206 - protein, 352 aa, Homo sapiens
NENSEQKENVEKEGLCNACTWRQNTKSSRIEAIKIQILSKLRLETAPNISKDVIRQLLPKAPPLRELIDQYDVQRADSSDGSLEDDDYHATTETIITMPTESDFLMQVDGKPKCCFFKFSSKIQYNKVVKAQLWIYLRPVETPTTVFVQILRLIKPMKDGTRYTGIRSLKLDMNPGTGIWQSIDVKTVLQNWLKQPESNLGIEIKALDENGHDLAVTFPGPGEDGLNPFLEVKVTDTPKASRADFGLDCDEHSTESRCCRYPLTVDFEAFGWDWIIAPKRYKANYCSGECEFVFLQKYPHTHLVHQANPRGSAGPCCTPTKMSPINMLYFNGKEQIIYGKIPAMVVDRCGCS

SEQ ID NO: 207 - protein, 383 aa, Homo sapiens
AEGPAAAAAAAAAAAAAGVGGERSSRPAPSVAPEPDGCPVCVWRQHSRELRLESIKSQILSKLRLKEAPNISREVVKQLLPKAPPLQQILDLHDFQGAALQPEDFLEEDEYHATTETVISMAQETDPAVQTDGSPLCCHFHFSPKVMFTKVLKAQLWVYLRPVPRPATVYLQILRLKPLTGEGTAGGGGGGRRHIRIRSLKIELHSRSGHWQSIDFKQVLHSWFRQPQSNWGIEINAFDPSGTDLAVTSLGPGAEGLHPFMELRVLENTKRSRRNLGLDCDEHSSESRCCRYPLTVDFEAFGWDWIIAPKRYKANYCSGQCEYMFMQKYPHTHLVQQANPRGSAGPCCTPTKMSPINMLYFNDKQQIIYGKIPGMVVDRCGCS

SEQ ID NO: 208 - protein, 382 aa, Homo sapiens
AEGPAAAAAAAAAAAAAGVGGERSSRPAPSVAPEPDGCPVCVWRQHSRELRLESIKSQILSKLRLKEAPNISREVVKQLLPKAPPLQQILDLHDFQGDALQPEDFLEEDEYHATTETVISMAQETDPAVQTDGSPLCCHFHFSPKVMFTKVLKAQLWVYLRPVPRPATVYLQILRLKPLTGEGTAGGGGGGRRHIRIRSLKIELHSRSGHWQSIDFKQVLHSWFRQPQSNWGIEINAFDPSGTDLAVTSLGPGAEGLHPFMELRVLENTKRSGNLGLDCDEHSSESRCCRYPLTVDFEAFGWDWIIAPKRYKANYCSGQCEYMFMQKYPHTHLVQQANPRGSAGPCCTPTKMSPINMLYFNDKQQIIYGKIPGMVVDRCGCS

SEQ ID NO: 209 - protein, 383 aa, Homo sapiens
AEGPAAAAAAAAAAAAAGVGGERSSRPAPSVAPEPDGCPVCVWRQHSRELRLESIKSQILSKLRLKEAPNISREVVKQLLPKAPPLQQILDLHDFQGDALQPEDFLEEDEYHATTETVISMAQETDPAVQTDGSPLCCHFHFSPKVMFTKVLKAQLWVYLRPVPRPATVYLQILRLKPLTGEGTAGGGGGGRRHIRIRSLKIELHSRSGHWQSIDFKQVLHSWFRQPQSNWGIEINAFDPSGTDLAVTSLGPGAEGLHPFMELRVLENTKASRANLGLDCDEHSSESRCCRYPLTVDFEAFGWDWIIAPKRYKANYCSGQCEYMFMQKYPHTHLVQQANPRGSAGPCCTPTKMSPINMLYFNDKQQIIYGKIPGMVVDRCGCS

SEQ ID NO: 210 - protein, 383 aa, Homo sapiens
AEGPAAAAAAAAAAAAAGVGGERSSRPAPSVAPEPDGCPVCVWRQHSRELRLESIKSQILSKLRLKEAPNISREVVKQLLPKAPPLQQILDLHDFQGAALQPEDFLEEDEYHATTETVISMAQETDPAVQTDGSPLCCHFHFSPKVMFTKVLKAQLWVYLRPVPRPATVYLQILRLKPLTGEGTAGGGGGGRRHIRIRSLKIELHSRSGHWQSIDFKQVLHSWFRQPQSNWGIEINAFDPSGTDLAVTSLGPGAEGLHPFMELRVLENTKASRANLGLDCDEHSSESRCCRYPLTVDFEAFGWDWIIAPKRYKANYCSGQCEYMFMQKYPHTHLVQQANPRGSAGPCCTPTKMSPINMLYFNDKQQIIYGKIPGMVVDRCGCS

SEQ ID NO: 211 - protein, 274 aa, Homo sapiens
AEGPAAAAAAAAAAAAAGVGGERSSRPAPSVAPEPDGCPVCVWRQHSRELRLESIKSQILSKLRLKEAPNISREVVKQLLPKAPPLQQILDLHDFQGAALQPEDFLEEDEYHATTETVISMAQETDPAVQTDGSPLCCHFHFSPKVMFTKVLKAQLWVYLRPVPRPATVYLQILRLKPLTGEGTAGGGGGGRRHIRIRSLKIELHSRSGHWQSIDFKQVLHSWFRQPQSNWGIEINAFDPSGTDLAVTSLGPGAEGLHPFMELRVLENTKRSRR

SEQ ID NO: 212 - protein, 45 aa, Homo sapiens
LSTSKTIDMELVKRKRIEAIRGQILSKLRLASPPSQGEVPPGPLP

SEQ ID NO: 213 - protein, 47 aa, Homo sapiens
LSTSKTIDMELVKRKRIEAIRGQILSKLRLASPPSQGEVPPGPLPEA

SEQ ID NO: 214 - protein, 56 aa, Homo sapiens
LSTSKTIDMELVKRKRIEAIRGQILSKLRLASPPSQGEVPPGPLPEAVLALYNSTR

SEQ ID NO: 215 - protein, 57 aa, Homo sapiens
LSTSKTIDMELVKRKRIEAIRGQILSKLRLASPPSQGEVPPGPLPEAVLALYNSTRD

SEQ ID NO: 216 - protein, 74 aa, Homo sapiens
LSTCKTIDMELVKRKRIEAIRGQILSKLRLASPPSQGEVPPGPLPEAVLALYNSTRDRVAGESAEPEPEPEADY

SEQ ID NO: 217 - protein, 207 aa, Homo sapiens
LSTCKTIDMELVKRKRIEAIRGQILSKLRLASPPSQGEVPPGPLPEAVLALYNSTRDRVAGESAEPEPEPEADYYAKEVTRVLMVETHNEIYDKFKQSTHSIYMFFNTSELREAVPEPVLLSRAELRLLRLKLKVEQHVELYQKYSNNSWRYLSNRLLAPSDSPEWLSFDVTGVVRQWLSRGGEIEGFRLSAHCSCDSRDNTLQVDI

SEQ ID NO: 218 - protein, 316 aa, Homo sapiens
EAVLALYNSTRDRVAGESAEPEPEPEADYYAKEVTRVLMVETHNEIYDKFKQSTHSIYMFFNTSELREAVPEPVLLSRAELRLLRLKLKVEQHVELYQKYSNNSWRYLSNRLLAPSDSPEWLSFDVTGVVRQWLSRGGEIEGFRLSAHCSCDSRDNTLQVDINGFTTGRRGDLATIHGMNRPFLLLMATPLERAQHLQSSRHRRALDTNYCFSSTEKNCCVRQLYIDFRKDLGWKWIHEPKGYHANFCLGPCPYIWSLDTQYSKVLALYNQHNPGASAAPCCVPQALEPLPIVYYVGRKPKVEQLSNMIVRSCKCS

SEQ ID NO: 219 - protein, 315 aa, Homo sapiens
AVLALYNSTRDRVAGESAEPEPEPEADYYAKEVTRVLMVETHNEIYDKFKQSTHSIYMFFNTSELREAVPEPVLLSRAELRLLRLKLKVEQHVELYQKYSNNSWRYLSNRLLAPSDSPEWLSFDVTGVVRQWLSRGGEIEGFRLSAHCSCDSRDNTLQVDINGFTTGRRGDLATIHGMNRPFLLLMATPLERAQHLQSSRHRRALDTNYCFSSTEKNCCVRQLYIDFRKDLGWKWIHEPKGYHANFCLGPCPYIWSLDTQYSKVLALYNQHNPGASAAPCCVPQALEPLPIVYYVGRKPKVEQLSNMIVRSCKCS

SEQ ID NO: 220 - protein, 201 aa, Homo sapiens
LALYNSTRDRVAGESAEPEPEPEADYYAKEVTRVLMVETHNEIYDKFKQSTHSIYMFFNTSELREAVPEPVLLSRAELRLLRLKLKVEQHVELYQKYSNNSWRYLSNRLLAPSDSPEWLSFDVTGVVRQWLSRGGEIEGFRLSAHCSCDSRDNTLQVDINGFTTGRRGDLATIHGMNRPFLLLMATPLERAQHLQSSRHRR

SEQ ID NO: 221 - protein, 193 aa, Homo sapiens
DRVAGESAEPEPEPEADYYAKEVTRVLMVETHNEIYDKFKQSTHSIYMFFNTSELREAVPEPVLLSRAELRLLRLKLKVEQHVELYQKYSNNSWRYLSNRLLAPSDSPEWLSFDVTGVVRQWLSRGGEIEGFRLSAHCSCDSRDNTLQVDINGFTTGRRGDLATIHGMNRPFLLLMATPLERAQHLQSSRHRR

SEQ ID NO: 222 - protein, 192 aa, Homo sapiens
RVAGESAEPEPEPEADYYAKEVTRVLMVETHNEIYDKFKQSTHSIYMFFNTSELREAVPEPVLLSRAELRLLRLKLKVEQHVELYQKYSNNSWRYLSNRLLAPSDSPEWLSFDVTGVVRQWLSRGGEIEGFRLSAHCSCDSRDNTLQVDINGFTTGRRGDLATIHGMNRPFLLLMATPLERAQHLQSSRHRR

SEQ ID NO: 223 - protein, 176 aa, Homo sapiens
YYAKEVTRVLMVETHNEIYDKFKQSTHSIYMFFNTSELREAVPEPVLLSRAELRLLRLKLKVEQHVELYQKYSNNSWRYLSNRLLAPSDSPEWLSFDVTGVVRQWLSRGGEIEGFRLSAHCSCDSRDNTLQVDINGFTTGRRGDLATIHGMNRPFLLLMATPLERAQHLQSSRHRR

SEQ ID NO: 224 - protein, 288 aa, Homo sapiens
YYAKEVTRVLMVETHNEIYDKFKQSTHSIYMFFNTSELREAVPEPVLLSRAELRLLRLKLKVEQHVELYQKYSNNSWRYLSNRLLAPSDSPEWLSFDVTGVVRQWLSRGGEIEGFRLSAHCSCDSRDNTLQVDINGFTTGRRGDLATIHGMNRPFLLLMATPLERAQHLQSSRHRRALDTNYCFSSTEKNCCVRQLYIDFRKDLGWKWIHEPKGYHANFCLGPCPYIWSLDTQYSKVLALYNQHNPGASAAPCCVPQALEPLPIVYYVGRKPKVEQLSNMIVRSCKCS

SEQ ID NO: 225 - protein, 175 aa, Homo sapiens
YAKEVTRVLMVETHNEIYDKFKQSTHSIYMFFNTSELREAVPEPVLLSRAELRLLRLKLKVEQHVELYQKYSNNSWRYLSNRLLAPSDSPEWLSFDVTGVVRQWLSRGGEIEGFRLSAHCSCDSRDNTLQVDINGFTTGRRGDLATIHGMNRPFLLLMATPLERAQHLQSSRHRR

SEQ ID NO: 226 - protein, 287 aa, Homo sapiens
YAKEVTRVLMVETHNEIYDKFKQSTHSIYMFFNTSELREAVPEPVLLSRAELRLLRLKLKVEQHVELYQKYSNNSWRYLSNRLLAPSDSPEWLSFDVTGVVRQWLSRGGEIEGFRLSAHCSCDSRDNTLQVDINGFTTGRRGDLATIHGMNRPFLLLMATPLERAQHLQSSRHRRALDTNYCFSSTEKNCCVRQLYIDFRKDLGWKWIHEPKGYHANFCLGPCPYIWSLDTQYSKVLALYNQHNPGASAAPCCVPQALEPLPIVYYVGRKPKVEQLSNMIVRSCKCS

SEQ ID NO: 227 - protein, 134 aa, Homo sapiens
FLLLMATPLERAQHLQSSRHRRALDTNYCFSSTEKNCCVRQLYIDFRKDLGWKWIHEPKGYHANFCLGPCPYIWSLDTQYSKVLALYNQHNPGASAAPCCVPQALEPLPIVYYVGRKPKVEQLSNMIVRSCKCS

SEQ ID NO: 228 - protein, 48 aa, Homo sapiens
SLSTSSTLDMDQFMRKRIEAIRGQILSKLKLTSPPEDYPEPEEVPPEV

SEQ ID NO: 229 - protein, 56 aa, Homo sapiens
SLSTSSTLDMDQFMRKRIEAIRGQILSKLKLTSPPEDYPEPEEVPPEVISIYNSTR

SEQ ID NO: 230 - protein, 57 aa, Homo sapiens
SLSTSSTLDMDQFMRKRIEAIRGQILSKLKLTSPPEDYPEPEEVPPEVISIYNSTRD

SEQ ID NO: 231 - protein, 19 aa, Homo sapiens
GTSTYTSGDQKTIKSTRKK

SEQ ID NO: 232 - protein, 236 aa, Homo sapiens
VISIYNSTRDLLQEKASRRAAACERERSDEEYYAKEVYKIDMPPFFPSENAIPPTFYRPYFRIVRFDVSAMEKNASNLVKAEFRVFRLQNPKARVPEQRIELYQILKSKDLTSPTQRYIDSKVVKTRAEGEWLSFDVTDAVHEWLHHKDRNLGFKISLHCPCCTFVPSNNYIIPNKSEELEARFAGIDGTSTYTSGDQKTIKSTRKKNSGKTPHLLLMLLPSYRLESQQTNRRKKR

SEQ ID NO: 233 - protein, 235 aa, Homo sapiens
ISIYNSTRDLLQEKASRRAAACERERSDEEYYAKEVYKIDMPPFFPSENAIPPTFYRPYFRIVRFDVSAMEKNASNLVKAEFRVFRLQNPKARVPEQRIELYQILKSKDLTSPTQRYIDSKVVKTRAEGEWLSFDVTDAVHEWLHHKDRNLGFKISLHCPCCTFVPSNNYIIPNKSEELEARFAGIDGTSTYTSGDQKTIKSTRKKNSGKTPHLLLMLLPSYRLESQQTNRRKKR

SEQ ID NO: 234 - protein, 227 aa, Homo sapiens
DLLQEKASRRAAACERERSDEEYYAKEVYKIDMPPFFPSENAIPPTFYRPYFRIVRFDVSAMEKNASNLVKAEFRVFRLQNPKARVPEQRIELYQILKSKDLTSPTQRYIDSKVVKTRAEGEWLSFDVTDAVHEWLHHKDRNLGFKISLHCPCCTFVPSNNYIIPNKSEELEARFAGIDGTSTYTSGDQKTIKSTRKKNSGKTPHLLLMLLPSYRLESQQTNRRKKR

SEQ ID NO: 235 - protein, 226 aa, Homo sapiens
LLQEKASRRAAACERERSDEEYYAKEVYKIDMPPFFPSENAIPPTFYRPYFRIVRFDVSAMEKNASNLVKAEFRVFRLQNPKARVPEQRIELYQILKSKDLTSPTQRYIDSKVVKTRAEGEWLSFDVTDAVHEWLHHKDRNLGFKISLHCPCCTFVPSNNYIIPNKSEELEARFAGIDGTSTYTSGDQKTIKSTRKKNSGKTPHLLLMLLPSYRLESQQTNRRKKR

SEQ ID NO: 236 - protein, 49 aa, Homo sapiens
SLSLSTSTTLDFGHIKKKRVEAIRGQILSKLRLTSPPEPTVMTHVPYQV

SEQ ID NO: 237 - protein, 57 aa, Homo sapiens
SLSLSTSTTLDFGHIKKKRVEAIRGQILSKLRLTSPPEPTVMTHVPYQVLALYNSTR

SEQ ID NO: 238 - protein, 58 aa, Homo sapiens
SLSLSTSTTLDFGHIKKKRVEAIRGQILSKLRLTSPPEPTVMTHVPYQVLALYNSTRE

SEQ ID NO: 239 - protein, 79 aa, Homo sapiens
SLSLSTCTTLDFGHIKKKRVEAIRGQILSKLRLTSPPEPTVMTHVPYQVLALYNSTRELLEEMHGEREEGCTQENTESE

SEQ ID NO: 240 - protein, 231 aa, Homo sapiens
LALYNSTRELLEEMHGEREEGCTQENTESEYYAKEIHKFDMIQGLAEHNELAVCPKGITSKVFRFNVSSVEKNRTNLFRAEFRVLRVPNPSSKRNEQRIELFQILRPDEHIAKQRYIGGKNLPTRGTAEWLSFDVTDTVREWLLRRESNLGLEISIHCPCHTFQPNGDILENIHEVMEIKFKGVDNEDDHGRGDLGRLKKQKDHHNPHLILMMIPPHRLDNPGQGGQRKKR

SEQ ID NO: 241 - protein, 222 aa, Homo sapiens
LLEEMHGEREEGCTQENTESEYYAKEIHKFDMIQGLAEHNELAVCPKGITSKVFRFNVSSVEKNRTNLFRAEFRVLRVPNPSSKRNEQRIELFQILRPDEHIAKQRYIGGKNLPTRGTAEWLSFDVTDTVREWLLRRESNLGLEISIHCPCHTFQPNGDILENIHEVMEIKFKGVDNEDDHGRGDLGRLKKQKDHHNPHLILMMIPPHRLDNPGQGGQRKKR

SEQ ID NO: 242 - protein, 201 aa, Homo sapiens
YYAKEIHKFDMIQGLAEHNELAVCPKGITSKVFRFNVSSVEKNRTNLFRAEFRVLRVPNPSSKRNEQRIELFQILRPDEHIAKQRYIGGKNLPTRGTAEWLSFDVTDTVREWLLRRESNLGLEISIHCPCHTFQPNGDILENIHEVMEIKFKGVDNEDDHGRGDLGRLKKQKDHHNPHLILMMIPPHRLDNPGQGGQRKKR

SEQ ID NO: 243 - protein, 75 aa, Homo sapiens
NENSEQKENVEKEGLCNACTWRQNTKSSRIEAIKIQILSKLRLETAPNISKDVIRQLLPKAPPLRELIDQYDVQR

SEQ ID NO: 244 - protein, 278 aa, Homo sapiens
RDDSSDGSLEDDDYHATTETIITMPTESDFLMQVDGKPKCCFFKFSSKIQYNKVVKAQLWIYLRPVETPTTVFVQILRLIKPMKDGTRYTGIRSLKLDMNPGTGIWQSIDVKTVLQNWLKQPESNLGIEIKALDENGHDLAVTFPGPGEDGLNPFLEVKVTDTPKRSRRDFGLDCDEHSTESRCCRYPLTVDFEAFGWDWIIAPKRYKANYCSGECEFVFLQKYPHTHLVHQANPRGSAGPCCTPTKMSPINMLYFNGKEQIIYGKIPAMVVDRCGCS

SEQ ID NO: 245 - protein, 288 aa, Homo sapiens
RELIDQYDVQRDDSSDGSLEDDDYHATTETIITMPTESDFLMQVDGKPKCCFFKFSSKIQYNKVVKAQLWIYLRPVETPTTVFVQILRLIKPMKDGTRYTGIRSLKLDMNPGTGIWQSIDVKTVLQNWLKQPESNLGIEIKALDENGHDLAVTFPGPGEDGLNPFLEVKVTDTPKRSRRDFGLDCDEHSTESRCCRYPLTVDFEAFGWDWIIAPKRYKANYCSGECEFVFLQKYPHTHLVHQANPRGSAGPCCTPTKMSPINMLYFNGKEQIIYGKIPAMVVDRCGCS

SEQ ID NO: 246 - protein, 168 aa, Homo sapiens
DDSSDGSLEDDDYHATTETIITMPTESDFLMQVDGKPKCCFFKFSSKIQYNKVVKAQLWIYLRPVETPTTVFVQILRLIKPMKDGTRYTGIRSLKLDMNPGTGIWQSIDVKTVLQNWLKQPESNLGIEIKALDENGHDLAVTFPGPGEDGLNPFLEVKVTDTPKRSRR

SEQ ID NO: 247 - protein, 96 aa, Homo sapiens
AEGPAAAAAAAAAAAAAGVGGERSSRPAPSVAPEPDGCPVCVWRQHSRELRLESIKSQILSKLRLKEAPNISREVVKQLLPKAPPLQQILDLHDFQ

SEQ ID NO: 248 - protein, 108 aa, Homo sapiens
AEGPAAAAAAAAAAAAAGVGGERSSRPAPSVAPEPDGCPVCVWRQHSRELRLESIKSQILSKLRLKEAPNISREVVKQLLPKAPPLQQILDLHDFQGDALQPEDFLEE

SEQ ID NO: 249 - protein, 178 aa, Homo sapiens
GDALQPEDFLEEDEYHATTETVISMAQETDPAVQTDGSPLCCHFHFSPKVMFTKVLKAQLWVYLRPVPRPATVYLQILRLKPLTGEGTAGGGGGGRRHIRIRSLKIELHSRSGHWQSIDFKQVLHSWFRQPQSNWGIEINAFDPSGTDLAVTSLGPGAEGLHPFMELRVLENTKRSRR

SEQ ID NO: 250 - protein, 64 aa, Homo sapiens
SPTPGSEGHSAAPDCPSCALAALPKDVPNSQPEMVEAVKKHILNMLHLKKRPDVTQPVPKAALL

SEQ ID NO: 251 - protein, 76 aa, Homo sapiens
SPTPGSEGHSAAPDCPSCALAALPKDVPNSQPEMVEAVKKHILNMLHLKKRPDVTQPVPKAALLNAIRKLHVGKVG

SEQ ID NO: 252 - protein, 224 aa, Homo sapiens
NAIRKLHVGKVGENGYVEIEDDIGRRAEMNELMEQTSEIITFAESGTARKTLHFEISKEGSDLSVVERAEVWLFLKVPKANRTRTKVTIRLFQQQKHPQGSLDTGEEAEEVGLKGERSELLLSEKVVDARKSTWHVFPVSSSIQRLLDQGKSSLDVRIACEQCQESGASLVLLGKKKKKEEEGEGKKKGGGEGGAGADEEKEQSHRPFLMLQARQSEDHPHRRR

SEQ ID NO: 253 - protein, 225 aa, Homo sapiens
NAIRKLHVGKVGENGYVEIEDDIGRRAEMNELMEQTSEIITFAESGTARKTLHFEISKEGSDLSVVERAEVWLFLKVPKANRTRTKVTIRLFQQQKHPQGSLDTGEEAEEVGLKGERSELLLSEKVVDARKSTWHVFPVSSSIQRLLDQGKSSLDVRIACEQCQESGASLVLLGKKKKKEEEGEGKKKGGGEGGAGADEEKEQSHRPFLMLQARQSEDHPHRRRR

SEQ ID NO: 254 - protein, 226 aa, Homo sapiens
NAIRKLHVGKVGENGYVEIEDDIGRRAEMNELMEQTSEIITFAESGTARKTLHFEISKEGSDLSVVERAEVWLFLKVPKANRTRTKVTIRLFQQQKHPQGSLDTGEEAEEVGLKGERSELLLSEKVVDARKSTWHVFPVSSSIQRLLDQGKSSLDVRIACEQCQESGASLVLLGKKKKKEEEGEGKKKGGGEGGAGADEEKEQSHRPFLMLQARQSEDHPHRRRRR

SEQ ID NO: 255 - protein, 213 aa, Homo sapiens
ENGYVEIEDDIGRRAEMNELMEQTSEIITFAESGTARKTLHFEISKEGSDLSVVERAEVWLFLKVPKANRTRTKVTIRLFQQQKHPQGSLDTGEEAEEVGLKGERSELLLSEKVVDARKSTWHVFPVSSSIQRLLDQGKSSLDVRIACEQCQESGASLVLLGKKKKKEEEGEGKKKGGGEGGAGADEEKEQSHRPFLMLQARQSEDHPHRRRR

SEQ ID NO: 256 - protein, 214 aa, Homo sapiens
ENGYVEIEDDIGRRAEMNELMEQTSEIITFAESGTARKTLHFEISKEGSDLSVVERAEVWLFLKVPKANRTRTKVTIRLFQQQKHPQGSLDTGEEAEEVGLKGERSELLLSEKVVDARKSTWHVFPVSSSIQRLLDQGKSSLDVRIACEQCQESGASLVLLGKKKKKEEEGEGKKKGGGEGGAGADEEKEQSHRPFLMLQARQSEDHPHRRRRR

SEQ ID NO: 257 - protein, 330 aa, Homo sapiens
ENGYVEIEDDIGRRAEMNELMEQTSEIITFAESGTARKTLHFEISKEGSDLSVVERAEVWLFLKVPKANRTRTKVTIRLFQQQKHPQGSLDTGEEAEEVGLKGERSELLLSEKVVDARKSTWHVFPVSSSIQRLLDQGKSSLDVRIACEQCQESGASLVLLGKKKKKEEEGEGKKKGGGEGGAGADEEKEQSHRPFLMLQARQSEDHPHRRRRRGLECDGKVNICCKKQFFVSFKDIGWNDWIIAPSGYHANYCEGECPSHIAGTSGSSLSFHSTVINHYRMRGHSPFANLKSCCVPTKLRPMSMLYYDDGQNIIKKDIQNMIVEECGCS

SEQ ID NO: 258 - protein, 116 aa, Homo sapiens [sequence omitted]

SEQ ID NO: 259 - protein, 395 aa, Artificial Sequence
  Description of Artificial Sequence: Synthetic polypeptide
SLSTCSTLDMDQFMRKRIEAIRGQILSKLKLTSPPEDYPEPEEVPPEVISIYNSTRDLLQEKASRRAAACERERSDEEYYAKEVYKIDMPPFFPSENAIPPTFYRPYFRIVRFDVSAMEKNASNLVKAEFRVFRLQNPKARVPEQRIELYQILKSKDLTSPTQRYIDSKVVKTRAEGEWLSFDVTDAVHEWLHHKDRNLGFKISLHCPCCTFVPSNNYIIPNKSEELEARFAGIDGTSTYTSGDQKTIKSTRKKNSGKTPHLLLMLLPSYRLESQQTNRRKKRALDTNYCFSSTEKNCCVRQLYIDFRKDLGWKWIHEPKGYHANFCLGPCPYIWSLDTQYSKVLALYNQHNPGASAAPCCVPQALEPLPIVYYVGRKPKVEQLSNMIVRSCKCS

SEQ ID NO: 260 - protein, 392 aa, Artificial Sequence
  Description of Artificial Sequence: Synthetic polypeptide
SLSLSTCTTLDFGHIKKKRVEAIRGQILSKLRLTSPPEPTVMTHVPYQVLALYNSTRELLEEMHGEREEGCTQENTESEYYAKEIHKFDMIQGLAEHNELAVCPKGITSKVFRFNVSSVEKNRTNLFRAEFRVLRVPNPSSKRNEQRIELFQILRPDEHIAKQRYIGGKNLPTRGTAEWLSFDVTDTVREWLLRRESNLGLEISIHCPCHTFQPNGDILENIHEVMEIKFKGVDNEDDHGRGDLGRLKKQKDHHNPHLILMMIPPHRLDNPGQGGQRKKRALDTNYCFSSTEKNCCVRQLYIDFRKDLGWKWIHEPKGYHANFCLGPCPYIWSLDTQYSKVLALYNQHNPGASAAPCCVPQALEPLPIVYYVGRKPKVEQLSNMIVRSCKCS

SEQ ID NO: 261 - protein, 361 aa, Artificial Sequence
  Description of Artificial Sequence: Synthetic polypeptide
SLSLSTCTTLDFGHIKKKRVEAIRGQILSKLRLTSPPEPTVMTHVPAVLALYNSTRDRVAGESAEPEPEPEADYYAKEVTRVLMVETHNEIYDKFKQSTHSIYMFFNTSELREAVPEPVLLSRAELRLLRLKLKVEQHVELYQKYSNNSWRYLSNRLLAPSDSPEWLSFDVTGVVRQWLSRGGEIEGFRLSAHCSCDSRDNTLQVDINGFTTGRRGDLATIHGMNRPFLLLMATPLERAQHLQSSRHRRALDTNYCFSSTEKNCCVRQLYIDFRKDLGWKWIHEPKGYHANFCLGPCPYIWSLDTQYSKVLALYNQHNPGASAAPCCVPQALEPLPIVYYVGRKPKVEQLSNMIVRSCKCS

SEQ ID NO: 262 - protein, 366 aa, Artificial Sequence
  Description of Artificial Sequence: Synthetic polypeptide
SLSLSTCTTLDFGHIKKKRVEAIRGQILSKLRLTSPPEPTVMTHVPYQVLALYNSTRELLEEMHGEREEGCTQENTESEYAKEVTRVLMVETHNEIYDKFKQSTHSIYMFFNTSELREAVPEPVLLSRAELRLLRLKLKVEQHVELYQKYSNNSWRYLSNRLLAPSDSPEWLSFDVTGVVRQWLSRGGEIEGFRLSAHCSCDSRDNTLQVDINGFTTGRRGDLATIHGMNRPFLLLMATPLERAQHLQSSRHRRALDTNYCFSSTEKNCCVRQLYIDFRKDLGWKWIHEPKGYHANFCLGPCPYIWSLDTQYSKVLALYNQHNPGASAAPCCVPQALEPLPIVYYVGRKPKVEQLSNMIVRSCKCS

SEQ ID NO: 263 - protein, 387 aa, Artificial Sequence
  Description of Artificial Sequence: Synthetic polypeptide
LSTCKTIDMELVKRKRIEAIRGQILSKLRLASPPSQGEVPPGPLPEAVLALYNSTRDRVAGESAEPEPEPEADYYYAKEIHKFDMIQGLAEHNELAVCPKGITSKVFRFNVSSVEKNRTNLFRAEFRVLRVPNPSSKRNEQRIELFQILRPDEHIAKQRYIGGKNLPTRGTAEWLSFDVTDTVREWLLRRESNLGLEISIHCPCHTFQPNGDILENIHEVMEIKFKGVDNEDDHGRGDLGRLKKQKDHHNPHLILMMIPPHRLDNPGQGGQRKKRALDTNYCFSSTEKNCCVRQLYIDFRKDLGWKWIHEPKGYHANFCLGPCPYIWSLDTQYSKVLALYNQHNPGASAAPCCVPQALEPLPIVYYVGRKPKVEQLSNMIVRSCKCS

SEQ ID NO: 264 - protein, 366 aa, Artificial Sequence
  Description of Artificial Sequence: Synthetic polypeptide
SLSLSTCTTLDFGHIKKKRVEAIRGQILSKLRLTSPPEPTVMTHVPYQVLALYNSTRELLEEMHGEREEGCTQENTESEYAKEVTRVLMVETHNEIYDKFKQSTHSIYMFFNTSELREAVPEPVLLSRAELRLLRLKLKVEQHVELYQKYSNNSWRYLSNRLLAPSDSPEWLSFDVTGVVRQWLSRGGEIEGFRLSAHCSCDSRDNTLQVDINGFTTGRRGDLATIHGMNRPFLLLMATPLERAQHLQSSRHRRALDTNYCFRNLEENCCVRPLYIDFRQDLGWKWVHEPKGYYANFCSGPCPYLRSADTTHSTVLGLYNTLNPEASASPCCVPQDLEPLTILYYVGRTPKVEQLSNMVVKSCKCS

SEQ ID NO: 265 - protein, 360 aa, Artificial Sequence
  Description of Artificial Sequence: Synthetic polypeptide
LSTCKTIDMELVKRKRIEAIRGQILSKLRLASPPSQGEVPPGPLPEAVLALYNSTRDRVAGESAEPEPEPEADYYAKEVTRVLMVETHNEIYDKFKQSTHSIYMFFNTSELREAVPEPVLLSRAELRLLRLKLKVEQHVELYQKYSNNSWRYLSNRLLAPSDSPEWLSFDVTGVVRQWLSRGGEIEGFRLSAHCSCDSRDNTLQVDIGTSTYTSGDQKTIKSTRKKFLLLMATPLERAQHLQSSRHRRALDTNYCFSSTEKNCCVRQLYIDFRKDLGWKWIHEPKGYHANFCLGPCPYIWSLDTQYSKVLALYNQHNPGASAAPCCVPQALEPLPIVYYVGRKPKVEQLSNMIVRSCKCS

SEQ ID NO: 266 - protein, 370 aa, Artificial Sequence
  Description of Artificial Sequence: Synthetic polypeptide
LSTCKTIDMELVKRKRIEAIRGQILSKLRLASPPSQGEVPPGPLPEAVLALYNSTRDRVAGESAEPEPEPEADYYAKEVTRVLMVETHNEIYDKFKQSTHSIYMFFNTSELREAVPEPVLLSRAELRLLRLKLKVEQHVELYQKYSNNSWRYLSNRLLAPSDSPEWLSFDVTGVVRQWLSRGGEIEGFRLSAHCSCDSRDNTLQVDIAGIDGTSTYTSGDQKTIKSTRKKNSGKTPFLLLMATPLERAQHLQSSRHRRALDTNYCFSSTEKNCCVRQLYIDFRKDLGWKWIHEPKGYHANFCLGPCPYIWSLDTQYSKVLALYNQHNPGASAAPCCVPQALEPLPIVYYVGRKPKVEQLSNMIVRSCKCS

SEQ ID NO: 267 - protein, 373 aa, Artificial Sequence
  Description of Artificial Sequence: Synthetic polypeptide
AEGPAAAAAAAAAAAAAGVGGERSSRPAPSVAPEPDGCPVCVWRQHSRELRLESIKSQILSKLRLKEAPNISREVVKQLLPKAPPLQQILDLHDFQDDSSDGSLEDDDYHATTETIITMPTESDFLMQVDGKPKCCFFKFSSKIQYNKVVKAQLWIYLRPVETPTTVFVQILRLIKPMKDGTRYTGIRSLKLDMNPGTGIWQSIDVKTVLQNWLKQPESNLGIEIKALDENGHDLAVTFPGPGEDGLNPFLEVKVTDTPKRSRRNLGLDCDEHSSESRCCRYPLTVDFEAFGWDWIIAPKRYKANYCSGQCEYMFMQKYPHTHLVQQANPRGSAGPCCTPTKMSPINMLYFNDKQQIIYGKIPGMVVDRCGCS

SEQ ID NO: 268 - protein, 374 aa, Artificial Sequence
  Description of Artificial Sequence: Synthetic polypeptide
AEGPAAAAAAAAAAAAAGVGGERSSRPAPSVAPEPDGCPVCVWRQHSRELRLESIKSQILSKLRLKEAPNISREVVKQLLPKAPPLRELIDQYDVQRDDSSDGSLEDDDYHATTETIITMPTESDFLMQVDGKPKCCFFKFSSKIQYNKVVKAQLWIYLRPVETPTTVFVQILRLIKPMKDGTRYTGIRSLKLDMNPGTGIWQSIDVKTVLQNWLKQPESNLGIEIKALDENGHDLAVTFPGPGEDGLNPFLEVKVTDTPKRSRRNLGLDCDEHSSESRCCRYPLTVDFEAFGWDWIIAPKRYKANYCSGQCEYMFMQKYPHTHLVQQANPRGSAGPCCTPTKMSPINMLYFNDKQQIIYGKIPGMVVDRCGCS

SEQ ID NO: 269 - protein, 264 aa, Artificial Sequence
  Description of Artificial Sequence: Synthetic polypeptide
AEGPAAAAAAAAAAAAAGVGGERSSRPAPSVAPEPDGCPVCVWRQHSRELRLESIKSQILSKLRLKEAPNISREVVKQLLPKAPPLQQILDLHDFQDDSSDGSLEDDDYHATTETIITMPTESDFLMQVDGKPKCCFFKFSSKIQYNKVVKAQLWIYLRPVETPTTVFVQILRLIKPMKDGTRYTGIRSLKLDMNPGTGIWQSIDVKTVLQNWLKQPESNLGIEIKALDENGHDLAVTFPGPGEDGLNPFLEVKVTDTPKRSRR

SEQ ID NO: 270 - protein, 265 aa, Artificial Sequence
  Description of Artificial Sequence: Synthetic polypeptide
AEGPAAAAAAAAAAAAAGVGGERSSRPAPSVAPEPDGCPVCVWRQHSRELRLESIKSQILSKLRLKEAPNISREVVKQLLPKAPPLRELIDQYDVQRDDSSDGSLEDDDYHATTETIITMPTESDFLMQVDGKPKCCFFKFSSKIQYNKVVKAQLWIYLRPVETPTTVFVQILRLIKPMKDGTRYTGIRSLKLDMNPGTGIWQSIDVKTVLQNWLKQPESNLGIEIKALDENGHDLAVTFPGPGEDGLNPFLEVKVTDTPKRSRR

SEQ ID NO: 271 - protein, 419 aa, Artificial Sequence
  Description of Artificial Sequence: Synthetic polypeptide
AEGPAAAAAAAAAAAAAGVGGERSSRPAPSVAPEPDGCPVCVWRQHSRELRLESIKSQILSKLRLKEAPNISREVVKQLLPKAPPLQQILDLHDFQENGYVEIEDDIGRRAEMNELMEQTSEIITFAESGTARKTLHFEISKEGSDLSVVERAEVWLFLKVPKANRTRTKVTIRLFQQQKHPQGSLDTGEEAEEVGLKGERSELLLSEKVVDARKSTWHVFPVSSSIQRLLDQGKSSLDVRIACEQCQESGASLVLLGKKKKKEEEGEGKKKGGGEGGAGADEEKEQSHRPFLMLQARQSEDHPHRRRRRNLGLDCDEHSSESRCCRYPLTVDFEAFGWDWIIAPKRYKANYCSGQCEYMFMQKYPHTHLVQQANPRGSAGPCCTPTKMSPINMLYFNDKQQIIYGKIPGMVVDRCGCS

SEQ ID NO: 272 - protein, 421 aa, Artificial Sequence
  Description of Artificial Sequence: Synthetic polypeptide
AEGPAAAAAAAAAAAAAGVGGERSSRPAPSVAPEPDGCPVCVWRQHSRELRLESIKSQILSKLRLKEAPNISREVVKQLLPKAPPLNAIRKLHVGKVGENGYVEIEDDIGRRAEMNELMEQTSEIITFAESGTARKTLHFEISKEGSDLSVVERAEVWLFLKVPKANRTRTKVTIRLFQQQKHPQGSLDTGEEAEEVGLKGERSELLLSEKVVDARKSTWHVFPVSSSIQRLLDQGKSSLDVRIACEQCQESGASLVLLGKKKKKEEEGEGKKKGGGEGGAGADEEKEQSHRPFLMLQARQSEDHPHRRRRRNLGLDCDEHSSESRCCRYPLTVDFEAFGWDWIIAPKRYKANYCSGQCEYMFMQKYPHTHLVQQANPRGSAGPCCTPTKMSPINMLYFNDKQQIIYGKIPGMVVDRCGCS

SEQ ID NO: 273 - protein, 310 aa, Artificial Sequence
  Description of Artificial Sequence: Synthetic polypeptide
AEGPAAAAAAAAAAAAAGVGGERSSRPAPSVAPEPDGCPVCVWRQHSRELRLESIKSQILSKLRLKEAPNISREVVKQLLPKAPPLQQILDLHDFQENGYVEIEDDIGRRAEMNELMEQTSEIITFAESGTARKTLHFEISKEGSDLSVVERAEVWLFLKVPKANRTRTKVTIRLFQQQKHPQGSLDTGEEAEEVGLKGERSELLLSEKVVDARKSTWHVFPVSSSIQRLLDQGKSSLDVRIACEQCQESGASLVLLGKKKKKEEEGEGKKKGGGEGGAGADEEKEQSHRPFLMLQARQSEDHPHRRRRR

SEQ ID NO: 274 - protein, 312 aa, Artificial Sequence
  Description of Artificial Sequence: Synthetic polypeptide
AEGPAAAAAAAAAAAAAGVGGERSSRPAPSVAPEPDGCPVCVWRQHSRELRLESIKSQILSKLRLKEAPNISREVVKQLLPKAPPLNAIRKLHVGKVGENGYVEIEDDIGRRAEMNELMEQTSEIITFAESGTARKTLHFEISKEGSDLSVVERAEVWLFLKVPKANRTRTKVTIRLFQQQKHPQGSLDTGEEAEEVGLKGERSELLLSEKVVDARKSTWHVFPVSSSIQRLLDQGKSSLDVRIACEQCQESGASLVLLGKKKKKEEEGEGKKKGGGEGGAGADEEKEQSHRPFLMLQARQSEDHPHRRRRR

SEQ ID NO: 275 - protein, 362 aa, Artificial Sequence
  Description of Artificial Sequence: Synthetic polypeptide
NENSEQKENVEKEGLCNACTWRQNTKSSRIEAIKIQILSKLRLETAPNISKDVIRQLLPKAPPLRELIDQYDVQRGDALQPEDFLEEDEYHATTETVISMAQETDPAVQTDGSPLCCHFHFSPKVMFTKVLKAQLWVYLRPVPRPATVYLQILRLKPLTGEGTAGGGGGGRRHIRIRSLKIELHSRSGHWQSIDFKQVLHSWFRQPQSNWGIEINAFDPSGTDLAVTSLGPGAEGLHPFMELRVLENTKRSRRDFGLDCDEHSTESRCCRYPLTVDFEAFGWDWIIAPKRYKANYCSGECEFVFLQKYPHTHLVHQANPRGSAGPCCTPTKMSPINMLYFNGKEQIIYGKIPAMVVDRCGCS

SEQ ID NO: 276 - protein, 361 aa, Artificial Sequence
  Description of Artificial Sequence: Synthetic polypeptide
NENSEQKENVEKEGLCNACTWRQNTKSSRIEAIKIQILSKLRLETAPNISKDVIRQLLPKAPPLQQILDLHDFQGDALQPEDFLEEDEYHATTETVISMAQETDPAVQTDGSPLCCHFHFSPKVMFTKVLKAQLWVYLRPVPRPATVYLQILRLKPLTGEGTAGGGGGGRRHIRIRSLKIELHSRSGHWQSIDFKQVLHSWFRQPQSNWGIEINAFDPSGTDLAVTSLGPGAEGLHPFMELRVLENTKRSRRDFGLDCDEHSTESRCCRYPLTVDFEAFGWDWIIAPKRYKANYCSGECEFVFLQKYPHTHLVHQANPRGSAGPCCTPTKMSPINMLYFNGKEQIIYGKIPAMVVDRCGCS

SEQ ID NO: 277 - protein, 253 aa, Artificial Sequence
  Description of Artificial Sequence: Synthetic polypeptide
NENSEQKENVEKEGLCNACTWRQNTKSSRIEAIKIQILSKLRLETAPNISKDVIRQLLPKAPPLRELIDQYDVQRGDALQPEDFLEEDEYHATTETVISMAQETDPAVQTDGSPLCCHFHFSPKVMFTKVLKAQLWVYLRPVPRPATVYLQILRLKPLTGEGTAGGGGGGRRHIRIRSLKIELHSRSGHWQSIDFKQVLHSWFRQPQSNWGIEINAFDPSGTDLAVTSLGPGAEGLHPFMELRVLENTKRSRR

SEQ ID NO: 278 - protein, 361 aa, Artificial Sequence; identical to SEQ ID NO: 276
  Description of Artificial Sequence: Synthetic polypeptide

SEQ ID NO: 279 - protein, 397 aa, Artificial Sequence
  Description of Artificial Sequence: Synthetic polypeptide
NENSEQKENVEKEGLCNACTWRQNTKSSRIEAIKIQILSKLRLETAPNISKDVIRQLLPKAPPLRELIDQYDVQRENGYVEIEDDIGRRAEMNELMEQTSEIITFAESGTARKTLHFEISKEGSDLSVVERAEVWLFLKVPKANRTRTKVTIRLFQQQKHPQGSLDTGEEAEEVGLKGERSELLLSEKVVDARKSTWHVFPVSSSIQRLLDQGKSSLDVRIACEQCQESGASLVLLGKKKKKEEEGEGKKKGGGEGGAGADEEKEQSHRPFLMLQARQSEDHPHRRRRDFGLDCDEHSTESRCCRYPLTVDFEAFGWDWIIAPKRYKANYCSGECEFVFLQKYPHTHLVHQANPRGSAGPCCTPTKMSPINMLYFNGKEQIIYGKIPAMVVDRCGCS

SEQ ID NO: 280 - protein, 399 aa, Artificial Sequence
  Description of Artificial Sequence: Synthetic polypeptide
NENSEQKENVEKEGLCNACTWRQNTKSSRIEAIKIQILSKLRLETAPNISKDVIRQLLPKAPPLNAIRKLHVGKVGENGYVEIEDDIGRRAEMNELMEQTSEIITFAESGTARKTLHFEISKEGSDLSVVERAEVWLFLKVPKANRTRTKVTIRLFQQQKHPQGSLDTGEEAEEVGLKGERSELLLSEKVVDARKSTWHVFPVSSSIQRLLDQGKSSLDVRIACEQCQESGASLVLLGKKKKKEEEGEGKKKGGGEGGAGADEEKEQSHRPFLMLQARQSEDHPHRRRRRDFGLDCDEHSTESRCCRYPLTVDFEAFGWDWIIAPKRYKANYCSGECEFVFLQKYPHTHLVHQANPRGSAGPCCTPTKMSPINMLYFNGKEQIIYGKIPAMVVDRCGCS

SEQ ID NO: 281 - protein, 289 aa, Artificial Sequence
  Description of Artificial Sequence: Synthetic polypeptide
NENSEQKENVEKEGLCNACTWRQNTKSSRIEAIKIQILSKLRLETAPNISKDVIRQLLPKAPPLRELIDQYDVQRENGYVEIEDDIGRRAEMNELMEQTSEIITFAESGTARKTLHFEISKEGSDLSVVERAEVWLFLKVPKANRTRTKVTIRLFQQQKHPQGSLDTGEEAEEVGLKGERSELLLSEKVVDARKSTWHVFPVSSSIQRLLDQGKSSLDVRIACEQCQESGASLVLLGKKKKKEEEGEGKKKGGGEGGAGADEEKEQSHRPFLMLQARQSEDHPHRRRRR

SEQ ID NO: 282 - protein, 290 aa, Artificial Sequence
  Description of Artificial Sequence: Synthetic polypeptide
NENSEQKENVEKEGLCNACTWRQNTKSSRIEAIKIQILSKLRLETAPNISKDVIRQLLPKAPPLNAIRKLHVGKVGENGYVEIEDDIGRRAEMNELMEQTSEIITFAESGTARKTLHFEISKEGSDLSVVERAEVWLFLKVPKANRTRTKVTIRLFQQQKHPQGSLDTGEEAEEVGLKGERSELLLSEKVVDARKSTWHVFPVSSSIQRLLDQGKSSLDVRIACEQCQESGASLVLLGKKKKKEEEGEGKKKGGGEGGAGADEEKEQSHRPFLMLQARQSEDHPHRRRRR

SEQ ID NO: 283 - protein, 360 aa, Artificial Sequence
  Description of Artificial Sequence: Synthetic polypeptide
SPTPGSEGHSAAPDCPSCALAALPKDVPNSQPEMVEAVKKHILNMLHLKKRPDVTQPVPKAALLNAIRKLHVGKVGDDSSDGSLEDDDYHATTETIITMPTESDFLMQVDGKPKCCFFKFSSKIQYNKVVKAQLWIYLRPVETPTTVFVQILRLIKPMKDGTRYTGIRSLKLDMNPGTGIWQSIDVKTVLQNWLKQPESNLGIEIKALDENGHDLAVTFPGPGEDGLNPFLEVKVTDTPKRSRRGLECDGKVNICCKKQFFVSFKDIGWNDWIIAPSGYHANYCEGECPSHIAGTSGSSLSFHSTVINHYRMRGHSPFANLKSCCVPTKLRPMSMLYYDDGQNIIKKDIQNMIVEECGCS

SEQ ID NO: 284 - protein, 359 aa, Artificial Sequence
  Description of Artificial Sequence: Synthetic polypeptide
SPTPGSEGHSAAPDCPSCALAALPKDVPNSQPEMVEAVKKHILNMLHLKKRPDVTQPVPKAALLRELIDQYDVQRDDSSDGSLEDDDYHATTETIITMPTESDFLMQVDGKPKCCFFKFSSKIQYNKVVKAQLWIYLRPVETPTTVFVQILRLIKPMKDGTRYTGIRSLKLDMNPGTGIWQSIDVKTVLQNWLKQPESNLGIEIKALDENGHDLAVTFPGPGEDGLNPFLEVKVTDTPKRSRRGLECDGKVNICCKKQFFVSFKDIGWNDWIIAPSGYHANYCEGECPSHIAGTSGSSLSFHSTVINHYRMRGHSPFANLKSCCVPTKLRPMSMLYYDDGQNIIKKDIQNMIVEECGCS

SEQ ID NO: 285 - protein, 244 aa, Artificial Sequence
  Description of Artificial Sequence: Synthetic polypeptide
SPTPGSEGHSAAPDCPSCALAALPKDVPNSQPEMVEAVKKHILNMLHLKKRPDVTQPVPKAALLNAIRKLHVGKVGDDSSDGSLEDDDYHATTETIITMPTESDFLMQVDGKPKCCFFKFSSKIQYNKVVKAQLWIYLRPVETPTTVFVQILRLIKPMKDGTRYTGIRSLKLDMNPGTGIWQSIDVKTVLQNWLKQPESNLGIEIKALDENGHDLAVTFPGPGEDGLNPFLEVKVTDTPKRSRR

SEQ ID NO: 286 - protein, 243 aa, Artificial Sequence
  Description of Artificial Sequence: Synthetic polypeptide
SPTPGSEGHSAAPDCPSCALAALPKDVPNSQPEMVEAVKKHILNMLHLKKRPDVTQPVPKAALLRELIDQYDVQRDDSSDGSLEDDDYHATTETIITMPTESDFLMQVDGKPKCCFFKFSSKIQYNKVVKAQLWIYLRPVETPTTVFVQILRLIKPMKDGTRYTGIRSLKLDMNPGTGIWQSIDVKTVLQNWLKQPESNLGIEIKALDENGHDLAVTFPGPGEDGLNPFLEVKVTDTPKRSRR

SEQ ID NO: 287 - protein, 370 aa, Artificial Sequence
  Description of Artificial Sequence: Synthetic polypeptide
SPTPGSEGHSAAPDCPSCALAALPKDVPNSQPEMVEAVKKHILNMLHLKKRPDVTQPVPKAALLNAIRKLHVGKVGGDALQPEDFLEEDEYHATTETVISMAQETDPAVQTDGSPLCCHFHFSPKVMFTKVLKAQLWVYLRPVPRPATVYLQILRLKPLTGEGTAGGGGGGRRHIRIRSLKIELHSRSGHWQSIDFKQVLHSWFRQPQSNWGIEINAFDPSGTDLAVTSLGPGAEGLHPFMELRVLENTKRSRRGLECDGKVNICCKKQFFVSFKDIGWNDWIIAPSGYHANYCEGECPSHIAGTSGSSLSFHSTVINHYRMRGHSPFANLKSCCVPTKLRPMSMLYYDDGQNIIKKDIQNMIVEECGCS

SEQ ID NO: 288 - protein, 368 aa, Artificial Sequence
  Description of Artificial Sequence: Synthetic polypeptide
SPTPGSEGHSAAPDCPSCALAALPKDVPNSQPEMVEAVKKHILNMLHLKKRPDVTQPVPKAALLQQILDLHDFQGDALQPEDFLEEDEYHATTETVISMAQETDPAVQTDGSPLCCHFHFSPKVMFTKVLKAQLWVYLRPVPRPATVYLQILRLKPLTGEGTAGGGGGGRRHIRIRSLKIELHSRSGHWQSIDFKQVLHSWFRQPQSNWGIEINAFDPSGTDLAVTSLGPGAEGLHPFMELRVLENTKRSRRGLECDGKVNICCKKQFFVSFKDIGWNDWIIAPSGYHANYCEGECPSHIAGTSGSSLSFHSTVINHYRMRGHSPFANLKSCCVPTKLRPMSMLYYDDGQNIIKKDIQNMIVEECGCS

SEQ ID NO: 289 - protein, 254 aa, Artificial Sequence
  Description of Artificial Sequence: Synthetic polypeptide
SPTPGSEGHSAAPDCPSCALAALPKDVPNSQPEMVEAVKKHILNMLHLKKRPDVTQPVPKAALLNAIRKLHVGKVGGDALQPEDFLEEDEYHATTETVISMAQETDPAVQTDGSPLCCHFHFSPKVMFTKVLKAQLWVYLRPVPRPATVYLQILRLKPLTGEGTAGGGGGGRRHIRIRSLKIELHSRSGHWQSIDFKQVLHSWFRQPQSNWGIEINAFDPSGTDLAVTSLGPGAEGLHPFMELRVLENTKRSRR

SEQ ID NO: 290 - protein, 252 aa, Artificial Sequence
  Description of Artificial Sequence: Synthetic polypeptide
SPTPGSEGHSAAPDCPSCALAALPKDVPNSQPEMVEAVKKHILNMLHLKKRPDVTQPVPKAALLQQILDLHDFQGDALQPEDFLEEDEYHATTETVISMAQETDPAVQTDGSPLCCHFHFSPKVMFTKVLKAQLWVYLRPVPRPATVYLQILRLKPLTGEGTAGGGGGGRRHIRIRSLKIELHSRSGHWQSIDFKQVLHSWFRQPQSNWGIEINAFDPSGTDLAVTSLGPGAEGLHPFMELRVLENTKRSRR

SEQ ID NO: 291 - protein, 386 aa, Artificial Sequence
  Description of Artificial Sequence: Synthetic polypeptide
LSTSKTIDMELVKRKRIEAIRGQILSKLRLASPPSQGEVPPGPLPEAVLALYNSTRDRVAGESAEPEPEPEADYYAKEIHKFDMIQGLAEHNELAVCPKGITSKVFRFNVSSVEKNRTNLFRAEFRVLRVPNPSSKRNEQRIELFQILRPDEHIAKQRYIGGKNLPTRGTAEWLSFDVTDTVREWLLRRESNLGLEISIHCPCHTFQPNGDILENIHEVMEIKFKGVDNEDDHGRGDLGRLKKQKDHHNPHLILMMIPPHRLDNPGQGGQRKKRALDTNYCFSSTEKNCCVRQLYIDFRKDLGWKWIHEPKGYHANFCLGPCPYIWSLDTQYSKVLALYNQHNPGASAAPCCVPQALEPLPIVYYVGRKPKVEQLSNMIVRSCKCS

SEQ ID NO: 292 - protein, 370 aa, Artificial Sequence
  Description of Artificial Sequence: Synthetic polypeptide
LSTSKTIDMELVKRKRIEAIRGQILSKLRLASPPSQGEVPPGPLPEAVLALYNSTRDRVAGESAEPEPEPEADYYAKEVTRVLMVETHNEIYDKFKQSTHSIYMFFNTSELREAVPEPVLLSRAELRLLRLKLKVEQHVELYQKYSNNSWRYLSNRLLAPSDSPEWLSFDVTGVVRQWLSRGGEIEGFRLSAHCSCDSRDNTLQVDINGFTGTSTYTSGDQKTIKSTRKKHGMNRPFLLLMATPLERAQHLQSSRHRRALDTNYCFSSTEKNCCVRQLYIDFRKDLGWKWIHEPKGYHANFCLGPCPYIWSLDTQYSKVLALYNQHNPGASAAPCCVPQALEPLPIVYYVGRKPKVEQLSNMIVRSCKCS

SEQ ID NO: 293 - protein, 367 aa, Artificial Sequence
  Description of Artificial Sequence: Synthetic polypeptide
SLSLSTSTTLDFGHIKKKRVEAIRGQILSKLRLTSPPEPTVMTHVPYQVLALYNSTRELLEEMHGEREEGCTQENTESEYYAKEVTRVLMVETHNEIYDKFKQSTHSIYMFFNTSELREAVPEPVLLSRAELRLLRLKLKVEQHVELYQKYSNNSWRYLSNRLLAPSDSPEWLSFDVTGVVRQWLSRGGEIEGFRLSAHCSCDSRDNTLQVDINGFTTGRRGDLATIHGMNRPFLLLMATPLERAQHLQSSRHRRALDTNYCFRNLEENCCVRPLYIDFRQDLGWKWVHEPKGYYANFCSGPCPYLRSADTTHSTVLGLYNTLNPEASASPCCVPQDLEPLTILYYVGRTPKVEQLSNMVVKSCKCS

SEQ ID NO: 294 - protein, 274 aa, Artificial Sequence
  Description of Artificial Sequence: Synthetic polypeptide
LSTSKTIDMELVKRKRIEAIRGQILSKLRLASPPSQGEVPPGPLPEAVLALYNSTRDRVAGESAEPEPEPEADYYAKEIHKFDMIQGLAEHNELAVCPKGITSKVFRFNVSSVEKNRTNLFRAEFRVLRVPNPSSKRNEQRIELFQILRPDEHIAKQRYIGGKNLPTRGTAEWLSFDVTDTVREWLLRRESNLGLEISIHCPCHTFQPNGDILENIHEVMEIKFKGVDNEDDHGRGDLGRLKKQKDHHNPHLILMMIPPHRLDNPGQGGQRKKR

SEQ ID NO: 295 - protein, 255 aa, Artificial Sequence
  Description of Artificial Sequence: Synthetic polypeptide
SLSLSTSTTLDFGHIKKKRVEAIRGQILSKLRLTSPPEPTVMTHVPYQVLALYNSTRELLEEMHGEREEGCTQENTESEYYAKEVTRVLMVETHNEIYDKFKQSTHSIYMFFNTSELREAVPEPVLLSRAELRLLRLKLKVEQHVELYQKYSNNSWRYLSNRLLAPSDSPEWLSFDVTGVVRQWLSRGGEIEGFRLSAHCSCDSRDNTLQVDINGFTTGRRGDLATIHGMNRPFLLLMATPLERAQHLQSSRHRR

SEQ ID NO: 296 - protein, 258 aa, Artificial Sequence
  Description of Artificial Sequence: Synthetic polypeptide
LSTSKTIDMELVKRKRIEAIRGQILSKLRLASPPSQGEVPPGPLPEAVLALYNSTRDRVAGESAEPEPEPEADYYAKEVTRVLMVETHNEIYDKFKQSTHSIYMFFNTSELREAVPEPVLLSRAELRLLRLKLKVEQHVELYQKYSNNSWRYLSNRLLAPSDSPEWLSFDVTGVVRQWLSRGGEIEGFRLSAHCSCDSRDNTLQVDINGFTGTSTYTSGDQKTIKSTRKKHGMNRPFLLLMATPLERAQHLQSSRHRR

SEQ ID NO: 297 - protein, 279 aa, Artificial Sequence
  Description of Artificial Sequence: Synthetic polypeptide
LSTSKTIDMELVKRKRIEAIRGQILSKLRLASPPSQGEVPPGPLPYQVLALYNSTRELLEEMHGEREEGCTQENTESEYYAKEIHKFDMIQGLAEHNELAVCPKGITSKVFRFNVSSVEKNRTNLFRAEFRVLRVPNPSSKRNEQRIELFQILRPDEHIAKQRYIGGKNLPTRGTAEWLSFDVTDTVREWLLRRESNLGLEISIHCPCHTFQPNGDILENIHEVMEIKFKGVDNEDDHGRGDLGRLKKQKDHHNPHLILMMIPPHRLDNPGQGGQRKKR

SEQ ID NO: 298 - protein, 283 aa, Artificial Sequence
  Description of Artificial Sequence: Synthetic polypeptide
LSTSKTIDMELVKRKRIEAIRGQILSKLRLASPPSQGEVPPGPLPPEVISIYNSTRDLLQEKASRRAAACERERSDEEYYAKEVYKIDMPPFFPSENAIPPTFYRPYFRIVRFDVSAMEKNASNLVKAEFRVFRLQNPKARVPEQRIELYQILKSKDLTSPTQRYIDSKVVKTRAEGEWLSFDVTDAVHEWLHHKDRNLGFKISLHCPCCTFVPSNNYIIPNKSEELEARFAGIDGTSTYTSGDQKTIKSTRKKNSGKTPHLLLMLLPSYRLESQQTNRRKKR

SEQ ID NO: 299 - protein, 279 aa, Artificial Sequence
  Description of Artificial Sequence: Synthetic polypeptide
LSTSKTIDMELVKRKRIEAIRGQILSKLRLASPPSQGEVPPGPLPEAVLALYNSTRELLEEMHGEREEGCTQENTESEYYAKEIHKFDMIQGLAEHNELAVCPKGITSKVFRFNVSSVEKNRTNLFRAEFRVLRVPNPSSKRNEQRIELFQILRPDEHIAKQRYIGGKNLPTRGTAEWLSFDVTDTVREWLLRRESNLGLEISIHCPCHTFQPNGDILENIHEVMEIKFKGVDNEDDHGRGDLGRLKKQKDHHNPHLILMMIPPHRLDNPGQGGQRKKR

SEQ ID NO: 300 - protein, 283 aa, Artificial Sequence
  Description of Artificial Sequence: Synthetic polypeptide
LSTSKTIDMELVKRKRIEAIRGQILSKLRLASPPSQGEVPPGPLPEAVISIYNSTRDLLQEKASRRAAACERERSDEEYYAKEVYKIDMPPFFPSENAIPPTFYRPYFRIVRFDVSAMEKNASNLVKAEFRVFRLQNPKARVPEQRIELYQILKSKDLTSPTQRYIDSKVVKTRAEGEWLSFDVTDAVHEWLHHKDRNLGFKISLHCPCCTFVPSNNYIIPNKSEELEARFAGIDGTSTYTSGDQKTIKSTRKKNSGKTPHLLLMLLPSYRLESQQTNRRKKR

SEQ ID NO: 301 - protein, 250 aa, Artificial Sequence
  Description of Artificial Sequence: Synthetic polypeptide
SLSLSTSTTLDFGHIKKKRVEAIRGQILSKLRLTSPPEPTVMTHVPYQVLALYNSTRDRVAGESAEPEPEPEADYYAKEVTRVLMVETHNEIYDKFKQSTHSIYMFFNTSELREAVPEPVLLSRAELRLLRLKLKVEQHVELYQKYSNNSWRYLSNRLLAPSDSPEWLSFDVTGVVRQWLSRGGEIEGFRLSAHCSCDSRDNTLQVDINGFTTGRRGDLATIHGMNRPFLLLMATPLERAQHLQSSRHRR

SEQ ID NO: 302 - protein, 284 aa, Artificial Sequence
  Description of Artificial Sequence: Synthetic polypeptide
SLSLSTSTTLDFGHIKKKRVEAIRGQILSKLRLTSPPEPTVMTHVPYQVISIYNSTRDLLQEKASRRAAACERERSDEEYYAKEVYKIDMPPFFPSENAIPPTFYRPYFRIVRFDVSAMEKNASNLVKAEFRVFRLQNPKARVPEQRIELYQILKSKDLTSPTQRYIDSKVVKTRAEGEWLSFDVTDAVHEWLHHKDRNLGFKISLHCPCCTFVPSNNYIIPNKSEELEARFAGIDGTSTYTSGDQKTIKSTRKKNSGKTPHLLLMLLPSYRLESQQTNRRKKR

SEQ ID NO: 303 - protein, 249 aa, Artificial Sequence
  Description of Artificial Sequence: Synthetic polypeptide
SLSTSSTLDMDQFMRKRIEAIRGQILSKLKLTSPPEDYPEPEEVPPEVLALYNSTRDRVAGESAEPEPEPEADYYAKEVTRVLMVETHNEIYDKFKQSTHSIYMFFNTSELREAVPEPVLLSRAELRLLRLKLKVEQHVELYQKYSNNSWRYLSNRLLAPSDSPEWLSFDVTGVVRQWLSRGGEIEGFRLSAHCSCDSRDNTLQVDINGFTTGRRGDLATIHGMNRPFLLLMATPLERAQHLQSSRHRR

SEQ ID NO: 304 - protein, 279 aa, Artificial Sequence
  Description of Artificial Sequence: Synthetic polypeptide
SLSTSSTLDMDQFMRKRIEAIRGQILSKLKLTSPPEDYPEPEEVPPEVLALYNSTRELLEEMHGEREEGCTQENTESEYYAKEIHKFDMIQGLAEHNELAVCPKGITSKVFRFNVSSVEKNRTNLFRAEFRVLRVPNPSSKRNEQRIELFQILRPDEHIAKQRYIGGKNLPTRGTAEWLSFDVTDTVREWLLRRESNLGLEISIHCPCHTFQPNGDILENIHEVMEIKFKGVDNEDDHGRGDLGRLKKQKDHHNPHLILMMIPPHRLDNPGQGGQRKKR

SEQ ID NO: 305 - protein, 283 aa, Artificial Sequence
  Description of Artificial Sequence: Synthetic polypeptide
LSTSKTIDMELVKRKRIEAIRGQILSKLRLASPPSQGEVPPGPLPEAVLALYNSTRDLLQEKASRRAAACERERSDEEYYAKEVYKIDMPPFFPSENAIPPTFYRPYFRIVRFDVSAMEKNASNLVKAEFRVFRLQNPKARVPEQRIELYQILKSKDLTSPTQRYIDSKVVKTRAEGEWLSFDVTDAVHEWLHHKDRNLGFKISLHCPCCTFVPSNNYIIPNKSEELEARFAGIDGTSTYTSGDQKTIKSTRKKNSGKTPHLLLMLLPSYRLESQQTNRRKKR

SEQ ID NO: 306 - protein, 279 aa, Artificial Sequence
  Description of Artificial Sequence: Synthetic polypeptide
LSTSKTIDMELVKRKRIEAIRGQILSKLRLASPPSQGEVPPGPLPEAVLALYNSTRDLLEEMHGEREEGCTQENTESEYYAKEIHKFDMIQGLAEHNELAVCPKGITSKVFRFNVSSVEKNRTNLFRAEFRVLRVPNPSSKRNEQRIELFQILRPDEHIAKQRYIGGKNLPTRGTAEWLSFDVTDTVREWLLRRESNLGLEISIHCPCHTFQPNGDILENIHEVMEIKFKGVDNEDDHGRGDLGRLKKQKDHHNPHLILMMIPPHRLDNPGQGGQRKKR

SEQ ID NO: 307 - protein, 250 aa, Artificial Sequence
  Description of Artificial Sequence: Synthetic polypeptide
SLSLSTSTTLDFGHIKKKRVEAIRGQILSKLRLTSPPEPTVMTHVPYQVLALYNSTRERVAGESAEPEPEPEADYYAKEVTRVLMVETHNEIYDKFKQSTHSIYMFFNTSELREAVPEPVLLSRAELRLLRLKLKVEQHVELYQKYSNNSWRYLSNRLLAPSDSPEWLSFDVTGVVRQWLSRGGEIEGFRLSAHCSCDSRDNTLQVDINGFTTGRRGDLATIHGMNRPFLLLMATPLERAQHLQSSRHRR

SEQ ID NO: 308 - protein, 284 aa, Artificial Sequence
  Description of Artificial Sequence: Synthetic polypeptide
SLSLSTSTTLDFGHIKKKRVEAIRGQILSKLRLTSPPEPTVMTHVPYQVLALYNSTRELLQEKASRRAAACERERSDEEYYAKEVYKIDMPPFFPSENAIPPTFYRPYFRIVRFDVSAMEKNASNLVKAEFRVFRLQNPKARVPEQRIELYQILKSKDLTSPTQRYIDSKVVKTRAEGEWLSFDVTDAVHEWLHHKDRNLGFKISLHCPCCTFVPSNNYIIPNKSEELEARFAGIDGTSTYTSGDQKTIKSTRKKNSGKTPHLLLMLLPSYRLESQQTNRRKKR

SEQ ID NO: 309 - protein, 249 aa, Artificial Sequence
  Description of Artificial Sequence: Synthetic polypeptide
SLSTSSTLDMDQFMRKRIEAIRGQILSKLKLTSPPEDYPEPEEVPPEVISIYNSTRDRVAGESAEPEPEPEADYYAKEVTRVLMVETHNEIYDKFKQSTHSIYMFFNTSELREAVPEPVLLSRAELRLLRLKLKVEQHVELYQKYSNNSWRYLSNRLLAPSDSPEWLSFDVTGVVRQWLSRGGEIEGFRLSAHCSCDSRDNTLQVDINGFTTGRRGDLATIHGMNRPFLLLMATPLERAQHLQSSRHRR

SEQ ID NO: 310 - protein, 279 aa, Artificial Sequence
  Description of Artificial Sequence: Synthetic polypeptide
SLSTSSTLDMDQFMRKRIEAIRGQILSKLKLTSPPEDYPEPEEVPPEVISIYNSTRDLLEEMHGEREEGCTQENTESEYYAKEIHKFDMIQGLAEHNELAVCPKGITSKVFRFNVSSVEKNRTNLFRAEFRVLRVPNPSSKRNEQRIELFQILRPDEHIAKQRYIGGKNLPTRGTAEWLSFDVTDTVREWLLRRESNLGLEISIHCPCHTFQPNGDILENIHEVMEIKFKGVDNEDDHGRGDLGRLKKQKDHHNPHLILMMIPPHRLDNPGQGGQRKKR

SEQ ID NO: 311 - protein, 7 aa, Unknown
  Description of Unknown: Osteopontin sequence
SVVYGLR

SEQ ID NO: 312 - protein, 8 aa, Unknown
  Description of Unknown: Tenascin C sequence
AEIDGIEL

SEQ ID NO: 313 - protein, 9 aa, Unknown
  Description of Unknown: Polydom/SVEP1 sequence
EDDMMEVPY

SEQ ID NO: 314 - protein, 8 aa, Unknown
  Description of Unknown: TGF-beta-2 sequence
AGIDGTST

SEQ ID NO: 315 - protein, 21 aa, Unknown
  Description of Unknown: TGF-beta-1 sequence
INGFTTGRRGDLATIHGMNRP

SEQ ID NO: 316 - protein, 10 aa, Unknown
  Description of Unknown: TGF-beta-1 sequence
SGRRGDLATI

SEQ ID NO: 317 - protein, 10 aa, Unknown
  Description of Unknown: TGF-beta-1 sequence
TGRRGDLATI

SEQ ID NO: 318 - protein, 27 aa, Unknown
  Description of Unknown: TGF-beta-3 sequence
FKGVDNEDDHGRGDLGRLKKQKDHHNP

SEQ ID NO: 319 - protein, 8 aa, Unknown
  Description of Unknown: GDF-8 sequence
PGEDGLNP

SEQ ID NO: 320 - protein, 8 aa, Unknown
  Description of Unknown: GDF-11 sequence
PGAEGLHP

SEQ ID NO: 321 - protein, 6 aa, Unknown
  Description of Unknown: Inhibin A sequence
RPEATP

SEQ ID NO: 322 - protein, 21 aa, Unknown
  Description of Unknown: BMP-9 sequence
SHRKGCDTLDISVPPGSRNLP

SEQ ID NO: 323 - protein, 21 aa, Unknown
  Description of Unknown: BMP-2 sequence
RHVRISRSLHQDEHSWSQIRP

SEQ ID NO: 324 - protein, 21 aa, Unknown
  Description of Unknown: BMP-4 sequence
QHVRISRSLPQGSGNWAQLRP

SEQ ID NO: 325 - protein, 11 aa, Unknown
  Description of Unknown: BMP-7 sequence
IGRHGPQNKQP

SEQ ID NO: 326 - protein, 11 aa, Unknown
  Description of Unknown: BMP-6 sequence
VGRDGPYDKQP

SEQ ID NO: 327 - protein, 11 aa, Unknown
  Description of Unknown: BMP-8 sequence
LGQRAPRSQQP

SEQ ID NO: 328 - protein, 14 aa, Unknown
  Description of Unknown: Lefty1 sequence
RFASQGAPAGLGEP

SEQ ID NO: 329 - protein, 227 aa, Artificial Sequence
  Description of Artificial Sequence: Synthetic polypeptide
DKTHTCPPCPAPELLGGPSVFLFPPKPKDTLMISRTPEVTCVVVDVSHEDPEVKFNWYVDGVEVHNAKTKPREEQYNSTYRVVSVLTVLHQDWLNGKEYKCKVSNKALPAPIEKTISKAKGQPREPQVYTLPPSREEMTKNQVSLTCLVKGFYPSDIAVEWESNGQPENNYKTTPPVLDSDGSFFLYSKLTVDKSRWQQGNVFSCSVMHEALHNHYTQKSLSLSPGK

SEQ ID NO: 330 - RNA, 80 nt, Homo sapiens
gccacggcggaacucaucgccgccugccuugcccgcugcuggacaggggcucggcuguugggcacugacaauuccguggu

SEQ ID NO: 331 - DNA, 592 bp, Homo sapiens
aatcaacctctggattacaaaatttgtgaaagattgactggtattcttaactatgttgctccttttacgctatgtggatacgctgctttaatgcctttgtatcatgctattgcttcccgtatggctttcattttctcctccttgtataaatcctggttgctgtctctttatgaggagttgtggcccgttgtcaggcaacgtggcgtggtgtgcactgtgtttgctgacgcaacccccactggttggggcattgccaccacctgtcagctcctttccgggactttcgctttccccctccctattgccacggcggaactcatcgccgcctgccttgcccgctgctggacaggggctcggctgttgggcactgacaattccgtggtgttgtcggggaagctgacgtcctttccatggctgctcgcctgtgttgccacctggattctgcgcgggacgtccttctgctacgtcccttcggccctcaatccagcggaccttccttcccgcggcctgctgccggctctgcggcctcttccgcgtcttcgccttcgccctcagacgagtcggatctccctttgggccgcctccccgcctg

SEQ ID NO: 332 - protein, 15 aa, Artificial Sequence
  Description of Artificial Sequence: Synthetic peptide
GLNDIFEAQKIEWHE

SEQ ID NO: 333 - DNA, 870 bp, Homo sapiens
agcttaccatggtaacccctggtcccgttcagccaccaccaccccacccagcacacctccaacctcagccagacaaggttgttgacacaagagagccctcaggggcacagagagagtctggacacgtggggagtcagccgtgtatcatcggaggcggccgggcacatggcagggatgagggaaagaccaagagtcctctgttgggcccaagtcctagacagacaaaacctagacaatcacgtggctggctgcatgcctgtggctgttgggctgggcaggaggagggaggggcgctctttcctggaggtggtccagagcaccgggtggacagccctgggggaaaacttccacgttttgatggaggttatctttgataactccacagtgacctggttcgccaaaggaaaagcaggcaacgtgagctgttttttttttctccaagctgaacactaggggtcctaggctttttgggtcacccggcatggcagacagtcaacctggcaggacatccgggagagacagacacaggcagagggcagaaaggtcaagggaggttctcaggccaaggctattggggtttgctcaattgttcctgaatgctcttacacacgtacacacacagagcagcacacacacacacacacacatgcctcagcaagtcccagagagggaggtgtcgagggggacccgctggctgttcagacggactcccagagccagtgagtgggtggggctggaacatgagttcatctatttcctgcccacatctggtataaaaggaggcagtggcccacagaggagcacagctgtgtttggctgcagggccaagagcgctgtcaagaagacccacacgcccccctccagcagctg

SEQ ID NO: 334 - DNA, 973 bp, Homo sapiens
ttggtctcctgtttccttaccaagcttttaccatggtaacccctggtcccgttcagccaccaccaccccacccagcacacctccaacctcagccagacaaggttgttgacacaagagagccctcaggggcacagagagagtctggacacgtggggagtcagccgtgtatcatcggaggcggccgggcacatggcagggatgagggaaagaccaagagtcctctgttgggcccaagtcctagacagacaaaacctagacaatcacgtggctggctgcatgccctgtggctgttgggctgggcccaggaggagggaggggcgctctttcctggaggtggtccagagcaccgggtggacagccctgggggaaaacttccacgttttgatggaggttatctttgataactccacagtgacctggttcgccaaaggaaaagcaggcaacgtgagctgttttttttttctccaagctgaacactaggggtcctaggctttttgggtcacccggcatggcagacagtcaacctggcaggacatccgggagagacagacacaggcagagggcagaaaggtcaagggaggttctcaggccaaggctattggggtttgctcaattgttcctgaatgctcttacacacgtacacacacagagcagcacacacacacacacacacatgcctcagcaagtcccagagagggaggtgtcgagggggacccgctggctgttcagacggactcccagagccagtgagtgggtggggctggaacatgagttcatctatttcctgcccacatctggtataaaaggaggcagtggcccacagaggagcacagctgtgtttggctgcagggccaagagcgctgtcaagaagacccacacgcccccctccagcagctgaattcctgcagctcagcagccgccgccagagcaggacgaaccgccaatcgcaaggcacctctgagaacttcaggta

SEQ ID NO: 335 - DNA, 1094 bp, Homo sapiens
ccatggcaaacaaaactcttctctaagtcaccaatgatcacaggcctcccactaaaaatacttcccaactctggggtggaagagtttgggggatgaatttttaggggattgcaagccccaatccccacctctgtgtccctagaatcccccacccctaccttggctgctccatcacccaaccaccaaagctttcttctgcagaggccacctagtcatgtttctcaccctgcacctcagcctccccactccatctctcaatcatgcctagggtttggaggaaggcatttgattctgttctggagcacagcagaagaattgacatcctcaaaattaaaactcccttgcctgcacccctccctcagatatctgattcttaatgtctagaaaggaatctgtaaattgttccccaaatattcctaagctccatcccctagccacaccagaagacacccccaaacaggcacatctttttaattcccagcttcctctgttttggagaggtcctcagcatgcctctttatgcccctcccttagctcttgccaggatatcagagggtgactggggcacagccaggaggaccccctccccaacacccccaacccttccacctttggaagtctccccacccagctccccagttccccagttccacttcttctagattggaggtcccaggaagagagcagaggggcacccctacccactggttagcccacgccattctgaggacccagctgcacccctaccacagcacctctggcccaggctgggctggggggctggggaggcagagctgcgaagaggggagatgtggggtggactcccttccctcctcctccccctctccattccaactcccaaattgggggccgggccaggcagctctgattggctggggcacgggcggccggctccccctctccgaggggcagggttcctccctgctctccatcaggacagtataaaaggggcccgggccagtcgtcggagcagacgggagtttctcctcggggtcggagcaggaggcacgcggagtgtgaggccacgcatgagcggacgctaaccccctccccagccacaaagagtctacatg

SEQ ID NO: 336 - DNA, 955 bp, Homo sapiens
tagagttcgcaaagcctatcctccctgtagccgggtgccaagcagcctcgagcctgctccccagcccacctgccaacaaaaggcgccctccgactgcaacccagccctccacagacaggacccgccctttcccgaagtcataagacaaagagagtgcatcactgctgaaacagtgggcgcacacgagccccaaagctagagaaaagctggacggggctgggggcggggtgcaggggtggaggggcggggaggcgggctccggctgcgccacgctatcgagtcttccctccctccttctctgccccctccgctcccgctggagccctccaccctacaagtggcctacagggcacaggtgaggcgggactggacagctcctgctttgatcgccggagatctgcaaattctgcccatgtcggggctgcagagcactccgacgtgtcccatagtgtttccaaacttggaaagggcgggggagggcgggaggatgcggagggcggaggtatgcagacaacgagtcagagtttccccttgaaagcctcaaaagtgtccacgtcctcaaaaagaatggaaccaatttaagaagccagccccgtggccacgtcccttcccccattcgctccctcctctgcgcccccgcaggctcctcccagctgtggctgcccgggcccccagccccagccctcccattggtggaggcccttttggaggcaccctagggccagggaaacttttgccgtataaatagggcagatccgggctttattattttagcaccacggcagcaggaggtttcggctaagttggaggtactggccacgactgcatgcccgcgcccgccaggtgatacctccgccggtgacccaggggctctgcgacacaaggagtctgcatgtctaagtgctagacatgctcagctttgtggatacgcggactttgttgctgcttgcagtaa

SEQ ID NO: 337 - DNA, 1043 bp, Homo sapiens
agtaaaagaccccaaaggctgagggcctcagaagcatcaggccatgatgttcctgaaacaagagggtcagggtcccaatgggcctctggggttcatcgtgaggatggatgcattaatattggggacctgctagggaccttcccagtgggacagtggctgggtcagggcactcaagccctaaaacgtgatgaggcgagacttttctctctttcctcattcagtaactgtcagtagattctgggagccagggattctccgactcttcaagtccatgaattttaggggatgacagtgggctctccgctttctcctccatgaagtaacttacatgcccctcaccctctgtgggaggggtgttgcagggggtgcagaactcccctcgccgggtagttcaagcaatggggaccatatcaattccatctatagggaaactgaggcctggagtagggcgaggcctctgggaacccagccctattctgtctctttccctggcatttcccatccacacatagagcttcagattctctttctttccccagagaccctcaaatatcctctcactcacagaatggtgtctctgcctgcctcgggttggccctgtgatttattttagttcttttcccttgttttttttttttcaaactctatacacttttgttttaaaaactgtggtttctcatgagccctattatctcattgatacctctcacctctgtggtgaggggaagaaatcatattttcagatgactcgtaaagggcaaagaaaaaaacccaaaatttcaaaatttccgtttaagtctcataatcaagaaaaggagaaacacagagagagagaaaaaaaaaactatgagaacccccccccaccccgtgattatcagcgcacacactcatcgaaaaaaatttggattattagaagagagaggtctgcggcttccacaccgtacagcgtggtttttcttctcggtataaaagcaaagttgtttttgatacgtgacagtttcccacaagccaggctgatccttttctgtcagtccacttcacca

SEQ ID NO: 338 - DNA, 108 bp, Homo sapiens
agccagacaagccagacaagccagacaagccagacaagccagacaagccagacaagccagacaagccagacaagccagacaagccagacaagccagacaagccagaca

SEQ ID NO: 339 - DNA, 46 bp, Human adenovirus
gggctataaaagggggtgggggcgcgttcgtcctcactctcttccg

SEQ ID NO: 340 - protein, 323 aa, Artificial Sequence
  Description of Artificial Sequence: Synthetic polypeptide
MDMRVPAQLLGLLLLWFSGVLGDYKDDDDKHHHHHHLEVLFQGPLSTSKTIDMELVKRKRIEAIRGQILSKLRLASPPSQGEVPPGPLPYQVLALYNSTRELLEEMHGEREEGCTQENTESEYYAKEIHKFDMIQGLAEHNELAVCPKGITSKVFRFNVSSVEKNRTNLFRAEFRVLRVPNPSSKRNEQRIELFQILRPDEHIAKQRYIGGKNLPTRGTAEWLSFDVTDTVREWLLRRESNLGLEISIHCPCHTFQPNGDILENIHEVMEIKFKGVDNEDDHGRGDLGRLKKQKDHHNPHLILMMIPPHRLDNPGQGGQRKKR

SEQ ID NO: 341 - protein, 327 aa, Artificial Sequence
  Description of Artificial Sequence: Synthetic polypeptide
MDMRVPAQLLGLLLLWFSGVLGDYKDDDDKHHHHHHLEVLFQGPLSTSKTIDMELVKRKRIEAIRGQILSKLRLASPPSQGEVPPGPLPPEVISIYNSTRDLLQEKASRRAAACERERSDEEYYAKEVYKIDMPPFFPSENAIPPTFYRPYFRIVRFDVSAMEKNASNLVKAEFRVFRLQNPKARVPEQRIELYQILKSKDLTSPTQRYIDSKVVKTRAEGEWLSFDVTDAVHEWLHHKDRNLGFKISLHCPCCTFVPSNNYIIPNKSEELEARFAGIDGTSTYTSGDQKTIKSTRKKNSGKTPHLLLMLLPSYRLESQQTNRRKKR

SEQ ID NO: 342 - protein, 323 aa, Artificial Sequence
  Description of Artificial Sequence: Synthetic polypeptide
MDMRVPAQLLGLLLLWFSGVLGDYKDDDDKHHHHHHLEVLFQGPLSTSKTIDMELVKRKRIEAIRGQILSKLRLASPPSQGEVPPGPLPEAVLALYNSTRELLEEMHGEREEGCTQENTESEYYAKEIHKFDMIQGLAEHNELAVCPKGITSKVFRFNVSSVEKNRTNLFRAEFRVLRVPNPSSKRNEQRIELFQILRPDEHIAKQRYIGGKNLPTRGTAEWLSFDVTDTVREWLLRRESNLGLEISIHCPCHTFQPNGDILENIHEVMEIKFKGVDNEDDHGRGDLGRLKKQKDHHNPHLILMMIPPHRLDNPGQGGQRKKR

SEQ ID NO: 343 - protein, 327 aa, Artificial Sequence
  Description of Artificial Sequence: Synthetic polypeptide
MDMRVPAQLLGLLLLWFSGVLGDYKDDDDKHHHHHHLEVLFQGPLSTSKTIDMELVKRKRIEAIRGQILSKLRLASPPSQGEVPPGPLPEAVISIYNSTRDLLQEKASRRAAACERERSDEEYYAKEVYKIDMPPFFPSENAIPPTFYRPYFRIVRFDVSAMEKNASNLVKAEFRVFRLQNPKARVPEQRIELYQILKSKDLTSPTQRYIDSKVVKTRAEGEWLSFDVTDAVHEWLHHKDRNLGFKISLHCPCCTFVPSNNYIIPNKSEELEARFAGIDGTSTYTSGDQKTIKSTRKKNSGKTPHLLLMLLPSYRLESQQTNRRKKR

SEQ ID NO: 344 - protein, 294 aa, Artificial Sequence
  Description of Artificial Sequence: Synthetic polypeptide
MDMRVPAQLLGLLLLWFSGVLGDYKDDDDKHHHHHHLEVLFQGPSLSLSTSTTLDFGHIKKKRVEAIRGQILSKLRLTSPPEPTVMTHVPYQVLALYNSTRDRVAGESAEPEPEPEADYYAKEVTRVLMVETHNEIYDKFKQSTHSIYMFFNTSELREAVPEPVLLSRAELRLLRLKLKVEQHVELYQKYSNNSWRYLSNRLLAPSDSPEWLSFDVTGVVRQWLSRGGEIEGFRLSAHCSCDSRDNTLQVDINGFTTGRRGDLATIHGMNRPFLLLMATPLERAQHLQSSRHRR

SEQ ID NO: 345 - protein, 328 aa, Artificial Sequence
  Description of Artificial Sequence: Synthetic polypeptide
MDMRVPAQLLGLLLLWFSGVLGDYKDDDDKHHHHHHLEVLFQGPSLSLSTSTTLDFGHIKKKRVEAIRGQILSKLRLTSPPEPTVMTHVPYQVISIYNSTRDLLQEKASRRAAACERERSDEEYYAKEVYKIDMPPFFPSENAIPPTFYRPYFRIVRFDVSAMEKNASNLVKAEFRVFRLQNPKARVPEQRIELYQILKSKDLTSPTQRYIDSKVVKTRAEGEWLSFDVTDAVHEWLHHKDRNLGFKISLHCPCCTFVPSNNYIIPNKSEELEARFAGIDGTSTYTSGDQKTIKSTRKKNSGKTPHLLLMLLPSYRLESQQTNRRKKR

SEQ ID NO: 346 - protein, 293 aa, Artificial Sequence
  Description of Artificial Sequence: Synthetic polypeptide
MDMRVPAQLLGLLLLWFSGVLGDYKDDDDKHHHHHHLEVLFQGPSLSTSSTLDMDQFMRKRIEAIRGQILSKLKLTSPPEDYPEPEEVPPEVLALYNSTRDRVAGESAEPEPEPEADYYAKEVTRVLMVETHNEIYDKFKQSTHSIYMFFNTSELREAVPEPVLLSRAELRLLRLKLKVEQHVELYQKYSNNSWRYLSNRLLAPSDSPEWLSFDVTGVVRQWLSRGGEIEGFRLSAHCSCDSRDNTLQVDINGFTTGRRGDLATIHGMNRPFLLLMATPLERAQHLQSSRHRR

SEQ ID NO: 347 - protein, 323 aa, Artificial Sequence
  Description of Artificial Sequence: Synthetic polypeptide
MDMRVPAQLLGLLLLWFSGVLGDYKDDDDKHHHHHHLEVLFQGPSLSTSSTLDMDQFMRKRIEAIRGQILSKLKLTSPPEDYPEPEEVPPEVLALYNSTRELLEEMHGEREEGCTQENTESEYYAKEIHKFDMIQGLAEHNELAVCPKGITSKVFRFNVSSVEKNRTNLFRAEFRVLRVPNPSSKRNEQRIELFQILRPDEHIAKQRYIGGKNLPTRGTAEWLSFDVTDTVREWLLRRESNLGLEISIHCPCHTFQPNGDILENIHEVMEIKFKGVDNEDDHGRGDLGRLKKQKDHHNPHLILMMIPPHRLDNPGQGGQRKKR

SEQ ID NO: 348 - protein, 327 aa, Artificial Sequence
  Description of Artificial Sequence: Synthetic polypeptide
MDMRVPAQLLGLLLLWFSGVLGDYKDDDDKHHHHHHLEVLFQGPLSTSKTIDMELVKRKRIEAIRGQILSKLRLASPPSQGEVPPGPLPEAVLALYNSTRDLLQEKASRRAAACERERSDEEYYAKEVYKIDMPPFFPSENAIPPTFYRPYFRIVRFDVSAMEKNASNLVKAEFRVFRLQNPKARVPEQRIELYQILKSKDLTSPTQRYIDSKVVKTRAEGEWLSFDVTDAVHEWLHHKDRNLGFKISLHCPCCTFVPSNNYIIPNKSEELEARFAGIDGTSTYTSGDQKTIKSTRKKNSGKTPHLLLMLLPSYRLESQQTNRRKKR

SEQ ID NO: 349 - protein, 323 aa, Artificial Sequence
  Description of Artificial Sequence: Synthetic polypeptide
MDMRVPAQLLGLLLLWFSGVLGDYKDDDDKHHHHHHLEVLFQGPLSTSKTIDMELVKRKRIEAIRGQILSKLRLASPPSQGEVPPGPLPEAVLALYNSTRDLLEEMHGEREEGCTQENTESEYYAKEIHKFDMIQGLAEHNELAVCPKGITSKVFRFNVSSVEKNRTNLFRAEFRVLRVPNPSSKRNEQRIELFQILRPDEHIAKQRYIGGKNLPTRGTAEWLSFDVTDTVREWLLRRESNLGLEISIHCPCHTFQPNGDILENIHEVMEIKFKGVDNEDDHGRGDLGRLKKQKDHHNPHLILMMIPPHRLDNPGQGGQRKKR

SEQ ID NO: 350 - protein, 294 aa, Artificial Sequence
  Description of Artificial Sequence: Synthetic polypeptide
MDMRVPAQLLGLLLLWFSGVLGDYKDDDDKHHHHHHLEVLFQGPSLSLSTSTTLDFGHIKKKRVEAIRGQILSKLRLTSPPEPTVMTHVPYQVLALYNSTRERVAGESAEPEPEPEADYYAKEVTRVLMVETHNEIYDKFKQSTHSIYMFFNTSELREAVPEPVLLSRAELRLLRLKLKVEQHVELYQKYSNNSWRYLSNRLLAPSDSPEWLSFDVTGVVRQWLSRGGEIEGFRLSAHCSCDSRDNTLQVDINGFTTGRRGDLATIHGMNRPFLLLMATPLERAQHLQSSRHRR

SEQ ID NO: 351 - protein, 328 aa, Artificial Sequence
  Description of Artificial Sequence: Synthetic polypeptide
MDMRVPAQLLGLLLLWFSGVLGDYKDDDDKHHHHHHLEVLFQGPSLSLSTSTTLDFGHIKKKRVEAIRGQILSKLRLTSPPEPTVMTHVPYQVLALYNSTRELLQEKASRRAAACERERSDEEYYAKEVYKIDMPPFFPSENAIPPTFYRPYFRIVRFDVSAMEKNASNLVKAEFRVFRLQNPKARVPEQRIELYQILKSKDLTSPTQRYIDSKVVKTRAEGEWLSFDVTDAVHEWLHHKDRNLGFKISLHCPCCTFVPSNNYIIPNKSEELEARFAGIDGTSTYTSGDQKTIKSTRKKNSGKTPHLLLMLLPSYRLESQQTNRRKKR

SEQ ID NO: 352 - protein, 293 aa, Artificial Sequence
  Description of Artificial Sequence: Synthetic polypeptide
MDMRVPAQLLGLLLLWFSGVLGDYKDDDDKHHHHHHLEVLFQGPSLSTSSTLDMDQFMRKRIEAIRGQILSKLKLTSPPEDYPEPEEVPPEVISIYNSTRDRVAGESAEPEPEPEADYYAKEVTRVLMVETHNEIYDKFKQSTHSIYMFFNTSELREAVPEPVLLSRAELRLLRLKLKVEQHVELYQKYSNNSWRYLSNRLLAPSDSPEWLSFDVTGVVRQWLSRGGEIEGFRLSAHCSCDSRDNTLQVDINGFTTGRRGDLATIHGMNRPFLLLMATPLERAQHLQSSRHRR

SEQ ID NO: 353 - protein, 323 aa, Artificial Sequence
  Description of Artificial Sequence: Synthetic polypeptide
MDMRVPAQLLGLLLLWFSGVLGDYKDDDDKHHHHHHLEVLFQGPSLSTSSTLDMDQFMRKRIEAIRGQILSKLKLTSPPEDYPEPEEVPPEVISIYNSTRDLLEEMHGEREEGCTQENTESEYYAKEIHKFDMIQGLAEHNELAVCPKGITSKVFRFNVSSVEKNRTNLFRAEFRVLRVPNPSSKRNEQRIELFQILRPDEHIAKQRYIGGKNLPTRGTAEWLSFDVTDTVREWLLRRESNLGLEISIHCPCHTFQPNGDILENIHEVMEIKFKGVDNEDDHGRGDLGRLKKQKDHHNPHLILMMIPPHRLDNPGQGGQRKKR

SEQ ID NO: 354 - protein, 387 aa, Homo sapiens
SLSTCSTLDMDQFMRKRIEAIRGQILSKLKLTSPPEDYPEPEEVPPEVISIYNSTRDLLQEKASRRAAACERERSDEEYYAKEVYKIDMPPFFPSENAIPPTFYRPYFRIVRFDVSAMEKNASNLVKAEFRVFRLQNPKARVPEQRIELYQILKSKDLTSPTQRYIDSKVVKTRAEGEWLSFDVTDAVHEWLHHKDRNLGFKISLHCPCCTFVPSNNYIIPNKSEELEARFYTSGDQKTIKSTRKKNSGKTPHLLLMLLPSYRLESQQTNRRKKRALDAAYCFRNVQDNCCLRPLYIDFKRDLGWKWIHEPKGYNANFCAGACPYLWSSDTQHSRVLSLYNTINPEASASPCCVSQDLEPLTILYYIGKTPKIEQLSNMIVKSCKCS

SEQ ID NO: 355 - protein, 387 aa, Homo sapiens
SLSTCSTLDMDQFMRKRIEAIRGQILSKLKLTSPPEDYPEPEEVPPEVISIYNSTRDLLQEKASRRAAACERERSDEEYYAKEVYKIDMPPFFPSENAIPPTFYRPYFRIVRFDVSAMEKNASNLVKAEFRVFRLQNPKARVPEQRIELYQILKSKDLTSPTQRYIDSKVVKTRAEGEWLSFDVTDAVHEWLHHKDRNLGFKISLHCPCCTFVPSNNYIIPNKSEELEARFAGIDGTSTIKSTRKKNSGKTPHLLLMLLPSYRLESQQTNRRKKRALDAAYCFRNVQDNCCLRPLYIDFKRDLGWKWIHEPKGYNANFCAGACPYLWSSDTQHSRVLSLYNTINPEASASPCCVSQDLEPLTILYYIGKTPKIEQLSNMIVKSCKCS

SEQ ID NO: 356 - protein, 387 aa, Homo sapiens
SLSTCSTLDMDQFMRKRIEAIRGQILSKLKLTSPPEDYPEPEEVPPEVISIYNSTRDLLQEKASRRAAACERERSDEEYYAKEVYKIDMPPFFPSENAIPPTFYRPYFRIVRFDVSAMEKNASNLVKAEFRVFRLQNPKARVPEQRIELYQILKSKDLTSPTQRYIDSKVVKTRAEGEWLSFDVTDAVHEWLHHKDRNLGFKISLHCPCCTFVPSNNYIIPNKSEELEARFAGIDGTSTYTSGDQKTSGKTPHLLLMLLPSYRLESQQTNRRKKRALDAAYCFRNVQDNCCLRPLYIDFKRDLGWKWIHEPKGYNANFCAGACPYLWSSDTQHSRVLSLYNTINPEASASPCCVSQDLEPLTILYYIGKTPKIEQLSNMIVKSCKCS

SEQ ID NO: 357 - protein, 391 aa, Homo sapiens
SLSTCSTLDMDQFMRKRIEAIRGQILSKLKLTSPPEDYPEPEEVPPEVISIYNSTRDLLQEKASRRAAACERERSDEEYYAKEVYKIDMPPFFPSENAIPPTFYRPYFRIVRFDVSAMEKNASNLVKAEFRVFRLQNPKARVPEQRIELYQILKSKDLTSPTQRYIDSKVVKTRAEGEWLSFDVTDAVHEWLHHKDRNLGFKISLHCPCCTFVPSNNYIIPNKSEELEARFAGIDGTSTYTSGDQKTIKSTRKKNPHLLLMLLPSYRLESQQTNRRKKRALDAAYCFRNVQDNCCLRPLYIDFKRDLGWKWIHEPKGYNANFCAGACPYLWSSDTQHSRVLSLYNTINPEASASPCCVSQDLEPLTILYYIGKTPKIEQLSNMIVKSCKCS

SEQ ID NO: 358 - protein, 391 aa, Homo sapiens
SLSTCSTLDMDQFMRKRIEAIRGQILSKLKLTSPPEDYPEPEEVPPEVISIYNSTRDLLQEKASRRAAACERERSDEEYYAKEVYKIDMPPFFPSENAIPPTFYRPYFRIVRFDVSAMEKNASNLVKAEFRVFRLQNPKARVPEQRIELYQILKSKDLTSPTQRYIDSKVVKTRAEGEWLSFDVTDAVHEWLHHKDRNLGFKISLHCPCCTFVPSNNYIIPNKSEELEARFGTSTYTSGDQKTIKSTRKKNSGKTPHLLLMLLPSYRLESQQTNRRKKRALDAAYCFRNVQDNCCLRPLYIDFKRDLGWKWIHEPKGYNANFCAGACPYLWSSDTQHSRVLSLYNTINPEASASPCCVSQDLEPLTILYYIGKTPKIEQLSNMIVKSCKCS

SEQ ID NO: 359 - protein, 395 aa, Homo sapiens
SLSTCSTLDMDQFMRKRIEAIRGQILSKLKLTSPPEDYPEPEEVPPEVISIYNSTRDLLQEKASRRAAACERERSDEEYYAKEVYKIDMPPFFPSENAIPPTFYRPYFRIVRFDVSAMEKNASNLVKAEFRVFRLQNPKARVPEQRIELYQILKSKDLTSPTQRYIDSKVVKTRAEGEWLSFDVTDAVHEWLHHKDRNLGFKISLHCPCCTFVPSNNYIIPNKSEELEARFAGFTGTSTYTSGDQKTIKSTRKKNSGKTPHLLLMLLPSYRLESQQTNRRKKRALDAAYCFRNVQDNCCLRPLYIDFKRDLGWKWIHEPKGYNANFCAGACPYLWSSDTQHSRVLSLYNTINPEASASPCCVSQDLEPLTILYYIGKTPKIEQLSNMIVKSCKCS

SEQ ID NO: 360 - protein, 386 aa, Homo sapiens
SLSTCSTLDMDQFMRKRIEAIRGQILSKLKLTSPPEDYPEPEEVPPEVISIYNSTRDLLQEKASRRAAACERERSDEEYYAKEVYKIDMPPFFPSENAIPPTFYRPYFRIVRFDVSAMEKNASNLVKAEFRVFRLQNPKARVPEQRIELYQILKSKDLTSPTQRYIDSKVVKTRAEGEWLSFDVTDAVHEWLHHKDRNLGFKISLHCPCCTFVPSNNYIIPNKSEELEARFAGIDTGRRGDLATINSGKTPHLLLMLLPSYRLESQQTNRRKKRALDAAYCFRNVQDNCCLRPLYIDFKRDLGWKWIHEPKGYNANFCAGACPYLWSSDTQHSRVLSLYNTINPEASASPCCVSQDLEPLTILYYIGKTPKIEQLSNMIVKSCKCS

SEQ ID NO: 361 - protein, 325 aa, Artificial Sequence
  Description of Artificial Sequence: Synthetic polypeptide
MDMRVPAQLLGLLLLWFSGVLGSVVRGHQAAATSESSPNGTAFPAAECLKPPDSEDCGEEQTRWHFDAQANNCLTFTFGHCHRNLNHFETYEACMLACMSGPLAACSLPALQGPCKAYAPRWAYNSQTGQCQSFVYGGCEGNGNNFESREACEESCPFPRGNQRCRACKPRQKLVTSFCRSDFVILGRVSELTEEPDSGRALVTVDEVLKDEKMGLKFLGQEPLEVTLLHVDWACPCPNVTVSEMPLIIMGEVDGGMAMLRPDSFVGASSARRVRKLREVMHKKTCDVLKEFLGLHLEVLFQGPHHHHHHGLNDIFEAQKIEWHE

SEQ ID NO: 362 - protein, 593 aa, Artificial Sequence
  Description of Artificial Sequence: Synthetic polypeptide
MDMRVPAQLLGLLLLWFSGVLGLPPIRYSHAGICPNDMNPNLWVDAQSTCRRECETDQECETYEKCCPNVCGTKSCVAARYMDVKGKKGPVGMPKEATCDHFMCLQQGSECDIWDGQPVCKCKDRCEKEPSFTCASDGLTYYNRCYMDAEACSKGITLAVVTCRYHFTWPNTSPPPPETTMHPTTASPETPELDMAAPALLNNPVHQSVTMGETVSFLCDVVGRPRPEITWEKQLEDRENVVMRPNHVRGNVVVTNIAQLVIYNAQLQDAGIYTCTARNVAGVLRADFPLSVVRGHQAAATSESSPNGTAFPAAECLKPPDSEDCGEEQTRWHFDAQANNCLTFTFGHCHRNLNHFETYEACMLACMSGPLAACSLPALQGPCKAYAPRWAYNSQTGQCQSFVYGGCEGNGNNFESREACEESCPFPRGNQRCRACKPRQKLVTSFCRSDFVILGRVSELTEEPDSGRALVTVDEVLKDEKMGLKFLGQEPLEVTLLHVDWACPCPNVTVSEMPLIIMGEVDGGMAMLRPDSFVGASSARRVRKLREVMHKKTCDVLKEFLGLHLEVLFQGPHHHHHHGLNDIFEAQKIEWHE

SEQ ID NO: 363 - protein, 244 aa, Artificial Sequence
  Description of Artificial Sequence: Synthetic polypeptide
MDMRVPAQLLGLLLLWFSGVLGGLNDIFEAQKIEWHEHHHHHHLEVLFQGPAACSLPALQGPCKAYAPRWAYNSQTGQCQSFVYGGCEGNGNNFESREACEESCPFPRGNQRCRACKPRQKLVTSFCRSDFVILGRVSELTEEPDSGRALVTVDEVLKDEKMGLKFLGQEPLEVTLLHVDWACPCPNVTVSEMPLIIMGEVDGGMAMLRPDSFVGASSARRVRKLREVMHKKTCDVLKEFLGLH

SEQ ID NO: 364 - protein, 190 aa, Artificial Sequence
  Description of Artificial Sequence: Synthetic polypeptide
MDMRVPAQLLGLLLLWFSGVLGFPRGNQRCRACKPRQKLVTSFCRSDFVILGRVSELTEEPDSGRALVTVDEVLKDEKMGLKFLGQEPLEVTLLHVDWACPCPNVTVSEMPLIIMGEVDGGMAMLRPDSFVGASSARRVRKLREVMHKKTCDVLKEFLGLHLEVLFQGPHHHHHHGLNDIFEAQKIEWHE

SEQ ID NO: 365 - protein, 321 aa, Artificial Sequence
  Description of Artificial Sequence: Synthetic polypeptide
MDMRVPAQLLGLLLLWFSGVLGSVVQREPARDAAPSIPAPAECLPDVQACTGPTSPHLVLWHYDPQRGGCMTFPARGCDGAARGFETYEACQQACARGPGDACVLPAVQGPCRGWEPRWAYSPLLQQCHPFVYGGCEGNGNNFHSRESCEDACPVPRTPPCRACRLRSKLALSLCRSDFAIVGRLTEVLEEPEAAGGIARVALEDVLKDDKMGLKFLGTKYLEVTLSGMDWACPCPNMTAGDGPLVIMGEVRDGVAVLDAGSYVRAASEKRVKKILELLEKQACELLNRFQDLEVLFQGPHHHHHHGLNDIFEAQKIEWHE

SEQ ID NO: 366 - protein, 580 aa, Artificial Sequence
  Description of Artificial Sequence: Synthetic polypeptide
MDMRVPAQLLGLLLLWFSGVLGAGLLPGLGSHPGVCPNQLSPNLWVDAQSTCERECSRDQDCAAAEKCCINVCGLHSCVAARFPGSPAAPTTAASCEGFVCPQQGSDCDIWDGQPVCRCRDRCEKEPSFTCASDGLTYYNRCYMDAEACLRGLHLHIVPCKHVLSWPPSSPGPPETTARPTPGAAPVPPALYSSPSPQAVQVGGTASLHCDVSGRPPPAVTWEKQSHQRENLIMRPDQMYGNVVVTSIGQLVLYNARPEDAGLYTCTARNAAGLLRADFPLSVVQREPARDAAPSIPAPAECLPDVQACTGPTSPHLVLWHYDPQRGGCMTFPARGCDGAARGFETYEACQQACARGPGDACVLPAVQGPCRGWEPRWAYSPLLQQCHPFVYGGCEGNGNNFHSRESCEDACPVPRTPPCRACRLRSKLALSLCRSDFAIVGRLTEVLEEPEAAGGIARVALEDVLKDDKMGLKFLGTKYLEVTLSGMDWACPCPNMTAGDGPLVIMGEVRDGVAVLDAGSYVRAASEKRVKKILELLEKQACELLNRFQDLEVLFQGPHHHHHHGLNDIFEAQKIEWHE

SEQ ID NO: 367 - protein, 243 aa, Artificial Sequence
  Description of Artificial Sequence: Synthetic polypeptide
MDMRVPAQLLGLLLLWFSGVLGGLNDIFEAQKIEWHEHHHHHHLEVLFQGPDACVLPAVQGPCRGWEPRWAYSPLLQQCHPFVYGGCEGNGNNFHSRESCEDACPVPRTPPCRACRLRSKLALSLCRSDFAIVGRLTEVLEEPEAAGGIARVALEDVLKDDKMGLKFLGTKYLEVTLSGMDWACPCPNMTAGDGPLVIMGEVRDGVAVLDAGSYVRAASEKRVKKILELLEKQACELLNRFQD

SEQ ID NO: 368 - protein, 189 aa, Artificial Sequence
  Description of Artificial Sequence: Synthetic polypeptide
MDMRVPAQLLGLLLLWFSGVLGVPRTPPCRACRLRSKLALSLCRSDFAIVGRLTEVLEEPEAAGGIARVALEDVLKDDKMGLKFLGTKYLEVTLSGMDWACPCPNMTAGDGPLVIMGEVRDGVAVLDAGSYVRAASEKRVKKILELLEKQACELLNRFQDLEVLFQGPHHHHHHGLNDIFEAQKIEWHE

SEQ ID NO: 369 - protein, 791 aa, Artificial Sequence
  Description of Artificial Sequence: Synthetic polypeptide
MDMRVPAQLLGLLLLWFSGVLGAFAHLQVPERVVPYFTQTPYSFLPLPTIKDAYRKFEIKITFRPDSADGMLLYNGQKRVPGSPTNLANRQPDFISFGLVGGRPEFRFDAGSGMATIRHPTPLALGHFHTVTLLRSLTQGSLIVGDLAPVNGTSQGKFQGLDLNEELYLGGYPDYGAIPKAGLSSGFIGCVRELRIQGEEIVFHDLNLTAHGISHCPTCRDRPCQNGGQCHDSESSSYVCVCPAGFTGSRCEHSQALHCHPEACGPDATCVNRPDGRGYTCRCHLGRSGLRCEEGVTVTTPSLSGAGSYLALPALTNTHHELRLDVEFKPLAPDGVLLFSGGKSGPVEDFVSLAMVGGHLEFRYELGSGLAVLRSAEPLALGRWHRVSAERLNKDGSLRVNGGRPVLRSSPGKSQGLNLHTLLYLGGVEPSVPLSPATNMSAHFRGCVGEVSVNGKRLDLTYSFLGSQGIGQCYDSSPCERQPCQHGATCMPAGEYEFQCLCRDGFKGDLCEHEENPCQLREPCLHGGTCQGTRCLCLPGFSGPRCQQGSGHGIAESDWHLEGSGGNDAPGQYGAYFHDDGFLAFPGHVFSRSLPEVPETIELEVRTSTASGLLLWQGVEVGEAGQGKDFISLGLQDGHLVFRYQLGSGEARLVSEDPINDGEWHRVTALREGRRGSIQVDGEELVSGRSPGPNVAVNAKGSVYIGGAPDVATLTGGRFSSGITGCVKNLVLHSARPGAPPPQPLDLQHRAQAGANTRPCPSLEVLFQGPHHHHHHGLNDIFEAQKIEWHE

SEQ ID NO: 370 - protein, 214 aa, Artificial Sequence
  Description of Artificial Sequence: Synthetic polypeptide
MDMRVPAQLLGLLLLWFSGVLGGQGCVDVNECELLSGVCGEAFCENVEGSFLCVCADENQEYSPMTGQCRSRTSTDLDVDVDQPKEEKKECYYNLNDASLCDNVLAPNVTKQECCCTSGVGWGDNCEIFPCPVLGTAEFTEMCPKGKGFVPAGESSSEAGGENYKDADECLLFGQEICKNGFCLNTRPGYECYCKQGTYYDPVKLQCFHHHHHH

SEQ ID NO: 371 - protein, 469 aa, Artificial Sequence
  Description of Artificial Sequence: Synthetic polypeptide
MDMRVPAQLLGLLLLWFSGVLGGQGCVDVNECELLSGVCGEAFCENVEGSFLCVCADENQEYSPMTGQCRSRTSTDLDVDVDQPKEEKKECYYNLNDASLCDNVLAPNVTKQECCCTSGVGWGDNCEIFPCPVLGTAEFTEMCPKGKGFVPAGESSSEAGGENYKDADECLLFGQEICKNGFCLNTRPGYECYCKQGTYYDPVKLQCFDMDECQDPSSCIDGQCVNTEGSYNCFCTHPMVLDASEKRCIRPAESNEQIEETDVYQDLCWEHLSDEYVCSRPLVGKQTTYTECCCLYGEAWGMQCALCPLKDSDDYAQLCNIPVTGRRQPYGRDALVDFSEQYTPEADPYFIQDRFLNSFEELQAEECGILNGCENGRCVRVQEGYTCDCFDGYHLDTAKMTCVDVNECDELNNRMSLCKNAKCINTDGSYKCLCLPGYVPSDKPNYCTPLNTALNLEKDSDLEHHHHHH

SEQ ID NO: 372 - protein, 207 aa, Artificial Sequence
  Description of Artificial Sequence: Synthetic polypeptide
MDMRVPAQLLGLLLLWFSGVLGNECELLSGVCGEAFCENVEGSFLCVCADENQEYSPMTGQCRSRTSTDLDVDVDQPKEEKKECYYNLNDASLCDNVLAPNVTKQECCCTSGVGWGDNCEIFPCPVLGTAEFTEMCPKGKGFVPAGESSSEAGGENYKDADECLLFGQEICKNGFCLNTRPGYECYCKQGTYYDPVKLQCFHHHHHH

SEQ ID NO: 373 - protein, 462 aa, Artificial Sequence
  Description of Artificial Sequence: Synthetic polypeptide
MDMRVPAQLLGLLLLWFSGVLGNECELLSGVCGEAFCENVEGSFLCVCADENQEYSPMTGQCRSRTSTDLDVDVDQPKEEKKECYYNLNDASLCDNVLAPNVTKQECCCTSGVGWGDNCEIFPCPVLGTAEFTEMCPKGKGFVPAGESSSEAGGENYKDADECLLFGQEICKNGFCLNTRPGYECYCKQGTYYDPVKLQCFDMDECQDPSSCIDGQCVNTEGSYNCFCTHPMVLDASEKRCIRPAESNEQIEETDVYQDLCWEHLSDEYVCSRPLVGKQTTYTECCCLYGEAWGMQCALCPLKDSDDYAQLCNIPVTGRRQPYGRDALVDFSEQYTPEADPYFIQDRFLNSFEELQAEECGILNGCENGRCVRVQEGYTCDCFDGYHLDTAKMTCVDVNECDELNNRMSLCKNAKCINTDGSYKCLCLPGYVPSDKPNYCTPLNTALNLEKDSDLEHHHHHH

SEQ ID NO: 374 - protein, 209 aa, Artificial Sequence
  Description of Artificial Sequence: Synthetic polypeptide
MDMRVPAQLLGLLLLWFSGVLGDVNECELLSGVCGEAFCENVEGSFLCVCADENQEYSPMTGQCRSRTSTDLDVDVDQPKEEKKECYYNLNDASLCDNVLAPNVTKQECCCTSGVGWGDNCEIFPCPVLGTAEFTEMCPKGKGFVPAGESSSEAGGENYKDADECLLFGQEICKNGFCLNTRPGYECYCKQGTYYDPVKLQCFHHHHHH

SEQ ID NO: 375 - protein, 292 aa, Artificial Sequence
  Description of Artificial Sequence: Synthetic polypeptide
MDMRVPAQLLGLLLLWFSGVLGDIDECVNNTVCDSHGFCDNTAGSFRCLCYQGFQAPQDGQGCVDVNECELLSGVCGEAFCENVEGSFLCVCADENQEYSPMTGQCRSRTSTDLDVDVDQPKEEKKECYYNLNDASLCDNVLAPNVTKQECCCTSGVGWGDNCEIFPCPVLGTAEFTEMCPKGKGFVPAGESSSEAGGENYKDADECLLFGQEICKNGFCLNTRPGYECYCKQGTYYDPVKLQCFDMDECQDPSSCIDGQCVNTEGSYNCFCTHPMVLDASEKRCIHHHHHH

SEQ ID NO: 376 - protein, 581 aa, Artificial Sequence
  Description of Artificial Sequence: Synthetic polypeptide
MDMRVPAQLLGLLLLWFSGVLGEINECTVNPDICGAGHCINLPVRYTCICYEGYRFSEQQRKCVDIDECTQVQHLCSQGRCENTEGSFLCICPAGFMASEEGTNCIDVDECLRPDVCGEGHCVNTVGAFRCEYCDSGYRMTQRGRCEDIDECLNPSTCPDEQCVNSPGSYQCVPCTEGFRGWNGQCLDVDECLEPNVCANGDCSNLEGSYMCSCHKGYTRTPDHKHCRDIDECQQGNLCVNGQCKNTEGSFRCTCGQGYQLSAAKDQCEDIDECQHRHLCAHGQCRNTEGSFQCVCDQGYRASGLGDHCEDINECLEDKSVCQRGDCINTAGSYDCTCPDGFQLDDNKTCQDINECEHPGLCGPQGECLNTEGSFHCVCQQGFSISADGRTCEDIDECVNNTVCDSHGFCDNTAGSFRCLCYQGFQAPQDGQGCVDVNECELLSGVCGEAFCENVEGSFLCVCADENQEYSPMTGQCRSRTSTDLDVDVDQPKEEKKECYYNLNDASLCDNVLAPNVTKQECCCTSGVGWGDNCEIFPCPVLGTAEFTEMCPKGKGFVPAGESSSEAGGENYKDAHHHHHH

SEQ ID NO: 377 - protein, 663 aa, Artificial Sequence
  Description of Artificial Sequence: Synthetic polypeptide
MDMRVPAQLLGLLLLWFSGVLGEINECTVNPDICGAGHCINLPVRYTCICYEGYRFSEQQRKCVDIDECTQVQHLCSQGRCENTEGSFLCICPAGFMASEEGTNCIDVDECLRPDVCGEGHCVNTVGAFRCEYCDSGYRMTQRGRCEDIDECLNPSTCPDEQCVNSPGSYQCVPCTEGFRGWNGQCLDVDECLEPNVCANGDCSNLEGSYMCSCHKGYTRTPDHKHCRDIDECQQGNLCVNGQCKNTEGSFRCTCGQGYQLSAAKDQCEDIDECQHRHLCAHGQCRNTEGSFQCVCDQGYRASGLGDHCEDINECLEDKSVCQRGDCINTAGSYDCTCPDGFQLDDNKTCQDINECEHPGLCGPQGECLNTEGSFHCVCQQGFSISADGRTCEDIDECVNNTVCDSHGFCDNTAGSFRCLCYQGFQAPQDGQGCVDVNECELLSGVCGEAFCENVEGSFLCVCADENQEYSPMTGQCRSRTSTDLDVDVDQPKEEKKECYYNLNDASLCDNVLAPNVTKQECCCTSGVGWGDNCEIFPCPVLGTAEFTEMCPKGKGFVPAGESSSEAGGENYKDADECLLFGQEICKNGFCLNTRPGYECYCKQGTYYDPVKLQCFDMDECQDPSSCIDGQCVNTEGSYNCFCTHPMVLDASEKRCIHHHHHH

SEQ ID NO: 378 - protein, 982 aa, Artificial Sequence
  Description of Artificial Sequence: Synthetic polypeptide
MDMRVPAQLLGLLLLWFSGVLGSTHPPPLPAKEEPVEALTFSREHGPGVAEPEVATAPPEKEIPSLDQEKTKLEPGQPQLSPGISTIHLHPQFPVVIEKTSPPVPVEVAPEASTSSASQVIAPTQVTEINECTVNPDICGAGHCINLPVRYTCICYEGYRFSEQQRKCVDIDECTQVQHLCSQGRCENTEGSFLCICPAGFMASEEGTNCIDVDECLRPDVCGEGHCVNTVGAFRCEYCDSGYRMTQRGRCEDIDECLNPSTCPDEQCVNSPGSYQCVPCTEGFRGWNGQCLDVDECLEPNVCANGDCSNLEGSYMCSCHKGYTRTPDHKHCRDIDECQQGNLCVNGQCKNTEGSFRCTCGQGYQLSAAKDQCEDIDECQHRHLCAHGQCRNTEGSFQCVCDQGYRASGLGDHCEDINECLEDKSVCQRGDCINTAGSYDCTCPDGFQLDDNKTCQDINECEHPGLCGPQGECLNTEGSFHCVCQQGFSISADGRTCEDIDECVNNTVCDSHGFCDNTAGSFRCLCYQGFQAPQDGQGCVDVNECELLSGVCGEAFCENVEGSFLCVCADENQEYSPMTGQCRSRTSTDLDVDVDQPKEEKKECYYNLNDASLCDNVLAPNVTKQECCCTSGVGWGDNCEIFPCPVLGTAEFTEMCPKGKGFVPAGESSSEAGGENYKDADECLLFGQEICKNGFCLNTRPGYECYCKQGTYYDPVKLQCFDMDECQDPSSCIDGQCVNTEGSYNCFCTHPMVLDASEKRCIRPAESNEQIEETDVYQDLCWEHLSDEYVCSRPLVGKQTTYTECCCLYGEAWGMQCALCPLKDSDDYAQLCNIPVTGRRQPYGRDALVDFSEQYTPEADPYFIQDRFLNSFEELQAEECGILNGCENGRCVRVQEGYTCDCFDGYHLDTAKMTCVDVNECDELNNRMSLCKNAKCINTDGSYKCLCLPGYVPSDKPNYCTPLNTALNLEKDSDLEHHHHHH

SEQ ID NO: 379 - protein, 279 aa, Artificial Sequence; identical to SEQ ID NO: 304
  Description of Artificial Sequence: Synthetic polypeptide

SEQ ID NO: 380 - protein, 634 aa, Mus sp.
EINECTVNPDICGAGHCINLPVRYTCICYEGYKFSEQLRKCVDIDECAQVRHLCSQGRCENTEGSFLCVCPAGFMASEEGTNCIDVDECLRPDMCRDGRCINTAGAFRCEYCDSGYRMSRRGYCEDIDECLKPSTCPEEQCVNTPGSYQCVPCTEGFRGWNGQCLDVDECLQPKVCTNGSCTNLEGSYMCSCHRGYSPTPDHRHCQDIDECQQGNLCMNGQCRNTDGSFRCTCGQGYQLSAAKDQCEDIDECEHHHLCSHGQCRNTEGSFQCVCNQGYRASVLGDHCEDINECLEDSSVCQGGDCINTAGSYDCTCPDGFQLNDNKGCQDINECAQPGLCGSHGECLNTQGSFHCVCEQGFSISADGRTCEDIDECVNNTVCDSHGFCDNTAGSFRCLCYQGFQAPQDGQGCVDVNECELLSGVCGEAFCENVEGSFLCVCADENQEYSPMTGQCRSRVTEDSGVDRQPREEKKECYYNLNDASLCDNVLAPNVTKQECCCTSGAGWGDNCEIFPCPVQGTAEFTEMCPRGKGLVPAGESSYDTGGENYKDADECLLFGEEICKNGYCLNTQPGYECYCKQGTYYDPVKLQCFDMDECQDPNSCIDGQCVNTEGSYNCFCTHPMVLDASEKRCV

SEQ ID NO: 381 - protein, 633 aa, Macaca fascicularis
EINECTVNPDICGAGHCINLPVRYTCICYEGYKFSEQQRKCVDIDECTQVQHLCSQGRCENTEGSFLCICPAGFMASEEGTNCIDVDECLRPDVCGEGHCVNTVGAFRCEYCDSGYRMTQRGRCEDIDECLNPSTCPDEQCVNSPGSYQCVPCTEGFRGWNGQCLDVDECLEPNVCTNGDCSNLEGSYMCSCHKGYTRTPDHKHCKDIDECQQGNLCVNGQCKNTEGSFRCTCGQGYQLSAAKDQCEDIDECQHHHLCAHGQCRNTEGSFQCVCDQGYRASGLGDHCEDINECLEDKSVCQRGDCINTAGSYDCTCPDGFQLDDNKTCQDINECEHPGLCGPQGECLNTEGSFHCVCQQGFSISADGRTCEDIDECVNNTVCDSHGFCDNTAGSFRCLCYQGFQAPQDGQGCVDVNECELLSGVCGEAFCENVEGSFLCVCADENQEYSPMTGQCRSRTSTDLDVEQPKEEKKECYYNLNDASLCDNVLAPNVTKQECCCTSGAGWGDNCEIFPCPVLGTAEFTEMCPKGKGFVPAGESSSEAGGENYKDADECLLFGQEICKNGFCLNTRPGYECYCKQGTYYDPVKLQCFDMDECQDPSSCIDGQCVNTEGSYNCFCTHPMVLDASEKRCI

SEQ ID NO: 382 - protein, 503 aa, Homo sapiens
ETDECRLNQNICGHGECVPGPPDYSCHCNPGYRSHPQHRYCVDVNECEAEPCGPGRGICMNTGGSYNCHCNRGYRLHVGAGGRSCVDLNECAKPHLCGDGGFCINFPGHYKCNCYPGYRLKASRPPVCEDIDECRDPSSCPDGKCENKPGSFKCIACQPGYRSQGGGACRDVNECAEGSPCSPGWCENLPGSFRCTCAQGYAPAPDGRSCLDVDECEAGDVCDNGICSNTPGSFQCQCLSGYHLSRDRSHCEDIDECDFPAACIGGDCINTNGSYRCLCPQGHRLVGGRKCQDIDECSQDPSLCLPHGACKNLQGSYVCVCDEGFTPTQDQHGCEEVEQPHHKKECYLNFDDTVFCDSVLATNVTQQECCCSLGAGWGDHCEIYPCPVYSSAEFHSLCPDGKGYTQDNNIVNYGIPAHRDIDECMLFGSEICKEGKCVNTQPGYECYCKQGFYYDGNLLECVDVDECLDESNCRNGVCENTRGGYRCACTPPAEYSPAQRQCL

SEQ ID NO: 383 - protein, 12 aa, Artificial Sequence
  Description of Artificial Sequence: Synthetic peptide
CQFDLSTRRLKC

SEQ ID NO: 384 - protein, 12 aa, Artificial Sequence
  Description of Artificial Sequence: Synthetic peptide
CQYNLSSRALKC

SEQ ID NO: 385 - protein, 361 aa, Sus scrofa
LSTCKTIDMELVKRKRIEAIRGQILSKLRLASPPSQGDVPPGPLPEAVLALYNSTRDRVAGESVEPEPEPEADYYAKEVTRVLMVESGNQIYDKFKGTPHSLYMLFNTSELREAVPEPVLLSRAELRLLRLKLKVEQHVELYQKYSNDSWRYLSNRLLAPSDSPEWLSFDVTGVVRQWLTRREAIEGFRLSAHCSCDSKDNTLHVEINGFNSGRRGDLATIHGMNRPFLLLMATPLERAQHLHSSRHRRALDTNYCFSSTEKNCCVRQLYIDFRKDLGWKWIHEPKGYHANFCLGPCPYIWSLDTQYSKVLALYNQHNPGASAAPCCVPQALEPLPIVYYVGRKPKVEQLSNMIVRSCKCS

SEQ ID NO: 386 - protein, 375 aa, Artificial Sequence
  Description of Artificial Sequence: Synthetic polypeptide
MQKLQLCVYIYLFMLIVAGPVDLNENSEQKENVEKEGLCNACTWRQNTKSSRIEAIKIQILSKLRLETAPNISKDVIRQLLPKAPPLRELIDQYDVQRDDSSDGSLEDDDYHATTETIITMPTESDFLMQVDGKPKCCFFKFSSKIQYNKVVKAQLWIYLRPVETPTTVFVQILRLIKPMKDGTRYTGIRSLKLDMNPGTGIWQSIDVKTVLQNWLKQPESNLGIEIKALDENGHDLAVTFPGPGEDGLNPFLEVKVTDTPKRSRRDFGLDCDEHSTESRCCRYPLTVDFEAFGWDWIIAPKRYKANYCSGECEFVFLQKYPHTHLVHQANPRGSAGPCCTPTKMSPINMLYFNGKEQIIYGKIPAMVVDRCGCS

SEQ ID NO: 387 - protein, 4 aa, Unknown
  Description of Unknown: 'KDEL' motif peptide
KDEL
